(19) United States
(12) Patent Application Publication
(10) Pub. No.: US 2017/0096678 A1
(43) Pub. Date: Apr. 6, 2017

(54) METHOD FOR INCREASING THE RESISTANCE OF A PLANT TO A PLANT RNA VIRUS

(71) Applicant: CENTRE NATIONAL DE LA RECHERCHE SCIENTIFIQUE, Paris (FR)

(72) Inventors: Philippe Giege, Strasbourg (FR); Anthony Gobert, Schiltigheim (FR)

(73) Assignee: CENTRE NATIONAL DE LA RECHERCHE SCIENTIFIQUE, Paris (FR)

(21) Appl. No.: 15/313,058

(22) PCT Filed: May 22, 2015
(86) PCT No.: PCT/IB2015/053796

§ 371 Date: Nov. 21, 2016

(30) Foreign Application Priority Data
May 23, 2014 (EP) 14305771.9

(51) Int. Cl. C12N 15/82; C12N 9/22; A01H 4/00; C12N 15/52

(52) U.S. Cl. CPC C12N 15/8283; C12N 15/52; C12Y 301/26005; C12N 9/22; A01H 4/008

(57) ABSTRACT

The disclosure relates to a method for increasing the resistance of a plant to a plant RNA virus, comprising expressing in said plant a mutant protein-only RNase P enzyme lacking a nuclear localization signal domain or an organelle targeting sequence domain, and related compositions.

[0001] The present invention relates to methods for increasing the resistance of a plant to a plant RNA virus and means for obtaining RNA virus-resistant plants.

[0002] The impact of plant viruses on the reduction of crop yields is major. Its cost is estimated at 60 billion U.S. dollars annually in the world (FAO, 2012). One of the most important characteristics of plant viruses is that 80% of them are RNA viruses (Mandahar, 2006). RNA viruses infect plants of economic importance, such as wheat, corn, cabbages, tobacco, potatoes, peanuts or the cocoa tree. There is therefore a need for innovative strategies against RNA viruses that are responsible for significant declines in crop yields.

[0003] Plant RNA viruses are characterized by the frequent presence of a tRNA-like structure (TLS) at the 3′ end of their genomic RNA. A tRNA-like structure is an RNA sequence mimicking a tRNA and capable of being aminoacylated by an amino acid and therefore of covalently bonding said amino acid residue at the 3′ position. The aminoacylation of TLS demonstrates that their structures are sufficiently similar to those of tRNAs to be recognized by tRNA binding enzymes (see for review Dreher, 2009 and 2010). The presence of TLS and/or their aminoacylation are crucial for these viruses. Aminoacylatable 3′ TLS may be involved in virus replication in the translation of their RNA and their packaging (Dreher, 2009). Work performed in vitro showed long ago that plant virus holding aminoacylatable 3′ TLS could be recognized and cleaved by RNase P enzymes (Guerrier-Takada et al., 1988).

[0004] In plants, tRNAs are synthesized as of immature precursors. One of the key steps of their maturation involves the cleavage of an additional 5′ nucleotide sequence. This cleavage is performed by an endonuclease called RNase P. Until very recently, all characterized RNase P were ribonucleoproteins (RNP), containing an RNA holding catalytic activity (Altman, 2007). However, a novel type of RNase P has recently been discovered in eukaryotes. This enzyme, called PRORP (protein-only RNase P), is of peptide nature and does not require RNA for its function (Gobert et al., 2010). PRORP enzymes are particularly important in plants because unlike animals or yeast, they have completely replaced RNPs for RNase P activity (Gutmann et al., 2012). PRORP enzymes are characterized by the presence of an RNA binding PPR domain, a metallonuclease domain holding the actual catalytic activity of the protein, as well as addressing sequences to the organelles (MTS) or the nucleus (NLS). In the plant model Arabidopsis thaliana, three PRORP enzymes are found. PRORP1 is localized in mitochondria and chloroplasts while PRORP2 and PRORP3 are located in the nucleus. Moreover, beyond tRNAs, it was shown that PRORP enzymes are capable both in vitro (Gobert et al., 2010) and in vivo (Gutmann et al., 2012) to cleave 3′ tRNA-like structures (TLS).

[0005] The inventors have constructed a mutant of A. thaliana PRORP2 protein (At2g16650) (called CytoRP). CytoRP is the result of the deletion of the first 24 amino acids (corresponding to the nuclear localization signal domain) of PRORP2. The inventors have constructed genetically transformed A. thaliana plants expressing CytoRP. The selected plants expressed CytoRP which is located in the cytosol and holds RNase P activity. This activity leads to the cleavage of the aminoacylatable 3′ tRNA-like structure (TLS) of plant RNA viruses and thus generates plants with increased resistance to RNA viruses.

[0006] Accordingly, the present invention provides a method for increasing the resistance of a plant to a plant RNA virus, wherein said method comprises expressing in said plant a mutant protein-only RNase P enzyme (hereinafter called CytoRP), and wherein said CytoRP:
[0007] is a protein-only RNase P enzyme comprising neither a nuclear localization signal (NLS) domain nor an organelle targeting sequence (MTS) domain, and
[0008] is able to cleave the aminoacylatable 3′ tRNA-like structure (TLS) of a plant RNA virus.

[0009] A protein-only RNase P enzyme (PRORP, for PROtein-only RNase P) is a protein with RNase P activity composed of an N-terminal α-super helix domain containing PPR motifs and a C-terminal NYN-type metallonuclease domain connected by a zinc-binding module (see FIG. 1, Gobert et al., 2010 and 2013; Gutmann et al., 2012; Howard et al., 2012).

[0010] N-Terminal α-Super Helix Domain Containing PPR Motifs

[0011] PPR domains contain 35 amino-acid repeats involved in RNA binding. They are eukaryote-specific. The primary sequence of PPR repeats is highly degenerate but their 3D structure is conserved. Each repeat is composed of an α-helix-turn-helix structure (Lurin et al., 2004). Structural predictions of the N-terminal domains of PRORP enzymes from diverse organisms using Phyre2 (Kelley and Sternberg, 2009) are congruent with the occurrence of a conserved α-super helix corresponding to the fold of PPR proteins (Small and Peeters, 2000). Predicted numbers of PPR repeats in PRORP sequences from various organisms range from 2 to 5 according to the TPRpred prediction software (Karpenahalli et al., 2007). As inferred from footprinting data (Gobert et al., 2013) and protein truncation (Howard et al., 2012), the N-terminal part of PRORP bears the RNA recognition domain that binds conserved nucleotides and structure elements in the D- and TψC-loops of tRNAs and tRNA-like structures (Gobert et al., 2013).

[0012] C-Terminal NYN-Type Metallonuclease Domain

[0013] The second main domain of PRORP enzymes is a metallonuclease domain (see FIG. 1) responsible for the actual nuclease activity of these enzymes (Gobert et al., 2010; Gutmann et al., 2012; Howard et al., 2012). This catalytic domain is a PIN-like domain from the NYN family. The NYN catalytic domain seems to originate from the putative bacterial ribonuclease coded by the yacP gene and is found throughout the main branches of life, with the exception of fungi (Anantharaman and Aravind, 2006). This domain contains conserved aspartate residues, but additional conserved residues are characteristic for the PRORP sub-family and allow to discriminate between PRORP and other NYN-domain proteins. The NYN domain of PRORP is characterized by 2 subparts. The first part comprises the following signature (D/E/T/H/N/P/G)h₃D(G/A)xN (SEQ ID NO: 1). In this subpart of the signature, “h₃” correspond to hydrophobic amino acids with few exceptions where 1 out of 3 amino acids is nucleophylic. The first acidic amino acid (D/E) is highly conserved in land plants. The second subpart of the domain contains the following conserved signature DDx₁₅(S/T)xDx₃DH (SEQ ID NO: 2). The length between the first and the second sub-domain is restricted to 70-80 amino acids in land plants.

[0014] Connecting Zinc-Binding Module

[0015] The PPR and NYN domains are connected by a zinc-binding module composed of 2 subparts placed upstream and downstream of the NYN domain (see FIG. 1). The first part contains a CxxC (SEQ ID NO: 3) motif strictly conserved in all PRORP sequences of land plants. This signature is found between 49 and 144 amino acid upstream of the NYN domain. The second subpart contains the following signatures (W/Y/F)HxPx (SEQ ID NO: 4), and (W/F)xCx₂₋₃(R/K) (SEQ ID NO: 5). The conserved C and H residues of this bi-partite module are implicated in zinc binding (Howard et al., 2012; Gobert et al., 2013).

[0016] Other Conserved Motifs of PRORP

[0017] Further signatures are presents in specific phyla. In land plants, a stretch of three to four glycines (Gs) separates the protein between the two main domains just before the zinc-binding module (see FIG. 1). Charged residues upstream of the Gs face the outside of PRORP structure and it might be involved in protein/protein interactions. In addition, a motif generally composed of MPxP(Y/F/C)(S/T) (SEQ ID NO: 6) is present between the NYN domain and the C-terminal part of the zinc-binding module (see FIG. 1).

[0018] PRORP MTS and NLS Domains

[0019] PRORP MTS sequences are N-terminal amphiphilic α-helices structures. Their occurrence can be predicted by softwares such as Predotar (Small et al., 2004) or TargetP (Emanuelsson et al., 2000). PRORP NLS sequences are mono or bi-partite sequences located most of the times in the N-terminal and/or C-terminal parts of proteins, characterized by the frequent occurrence of basic residues such as Lysines and Arginines. Their occurrence can be predicted by softwares such as NLStradamus (Nguyen Ba et al., 2009).

[0020] Numbering of Important Positions in Arabidopsis PRORP2 (SEQ ID NO: 105)
[0021] The nuclear localization signal of AtPRORP2 is composed of residues 1 to 24.
[0022] Among the 5 PPR repeats found in AtPRORP2, the positions L34, S65, Q70, N108, S114, R145, A150, E180, S185, S215 are predicted to be important for RNA substrate recognition, according to the proposed PPR/RNA recognition code (Barkan et al., 2012).
[0023] The bi-partite zinc-binding motif contains residues C281 and C284 in the middle of AtPRORP2 sequence and residues W493, H494, P496, C511 and R514 at the C-terminal end of AtPRORP2 sequence.
[0024] In the conserved NYN domain, residues E339, D343, D421, D422, D440, D444 and H445 are predicted to be of high functional importance. Residues D421 and D422 were already shown to be essential for catalytic activity (Gutmann et al., 2012).
[0025] Other motifs are characteristic of plant AtPRORP enzymes. Among them, a motif composed by G254, G255 and G256 is present in AtPRORP2. Another motif of unknown function contains the conserved M477 and S482.

[0026] Methods for Retrieving PRORPs

[0027] PRORP sequences can be retrieved using the BLAST tool (Altschul et al., 1990) in the following databases:

NCBI (http://www.ncbi.nlm.nih.gov/blast/Blast.cgi),
Ensembl (http://www.ensembl.org/Multi/blastview),
Bogas (http://bioinformatics.psb.ugent.be/webtools/bogas/),
Phytozome (http://www.phytozome.net/),
JGI (http://genome.jgi-psf.org/) and/or
Broad (http://www.broadinstitute.org/scientific-community/data).

[0028] The sequences can be aligned using Muscle (EMBL-EBI: http://www.ebi.ac.uk/Tools/msa/muscle/) (Edgar, 2004) before using WebLogo 3 ((Crooks et al., 2004), http://weblogo.threeplusone.com/create.cgi) to highlight the conserved residues.

[0029] Advantageously, the protein-only RNase P enzyme contains the residues G254, G255, G256, C281, C284, E339, D343, D421, D422, D440, D444, H445, M477, 5482, W493, H494, P496, C511 and R514, and eventually at least one of the residues selected from the group consisting of L34, S65, Q70, N108, S114, R145, A150, E180, 5185 and 5215, numbered according to A. thaliana PRORP2 sequence represented as SEQ ID NO: 105.

[0030] Advantageously, the protein-only RNase P enzyme has the consensus amino acid sequence described in FIG. 2 (SEQ ID NO: 7).

[0031] Advantageously, the protein-only RNase P enzyme is from a land plant, such as a PRORP enzyme selected from the group consisting of Oryza sativa (rice) SEQ ID NO: 8, 9 or 10; Zea mays (corn) SEQ ID NO: 11, 12 or 13; Triticum turgidum (wheat) SEQ ID NO: 14 or 15; Solanum lycopersicum (tomato) SEQ ID NO: 16, 17 or 18; Brassica rapa (turnip) SEQ ID NO: 19, 20 or 21; Carica papaya (papaya) SEQ ID NO: 22, 23 or 24; Solanum tuberosum (potato) SEQ ID NO: 25, 26 or 27; Nicotiana tabacum (tobacco) SEQ ID NO: 28, 29 or 30; Setaria (millet) SEQ ID NO: 31, 32 or 33; Sorghum bicolor (sorghum) SEQ ID NO: 34, 35, 36 or 37; Hordeum vulgare (barley) SEQ ID NO: 38 or 39; Oryza officinalis (rice) SEQ ID NO: 40; Manihot esculenta (manioc) SEQ ID NO: 41, 42 or 43; Theobroma cacao (cocoa) SEQ ID NO: 44, 45 or 46; Cucumis sativus (cucumber) SEQ ID NO: 47, 48 or 49; Vitis vinifera (vine) SEQ ID NO: 50, 51, 52 or 53; Glycine max (soybean) SEQ ID NO: 54, 55, 56, 57 or 58; Prunus persica (peach) SEQ ID NO: 59, 60 or 61; Malus domestica (apple) SEQ ID NO: 62, 63 or 64; Fragaria vesca (strawberry) SEQ ID NO: 65, 66 or 67; Citrus clementina (clementine) SEQ ID NO: 68, 69 or 70; Citrus sinensis (orange) SEQ ID NO: 71, 72 or 73; Populus trichocarpa (poplar) SEQ ID NO: 74, 75, 76, 77 or 78; Eucalyptus SEQ ID NO: 79, 80 or 81; Ricinus communis (ricinus) SEQ ID NO: 82, 83 or 84; Medicago sativa (alfalfa/lucerne) SEQ ID NO: 85, 86 or 87; Lotus SEQ ID NO: 88 or 89; Aquilegia (columbine) SEQ ID NO: 90, 91 or 92; Eutrema halophila SEQ ID NO: 93, 94 or 95; Eutrema parvulum SEQ ID NO: 96, 97 or 98; Mimulus (monkey-flower) SEQ ID NO: 99, 100, 101 or 102; Jatropha SEQ ID NO: 103; Arabidopsis thaliana SEQ ID NO: 104, 105 or 106; Arabidopsis lyrata SEQ ID NO: 107, 108 or 109; Brachypodium SEQ ID NO: 110, 111 or 112; Physcomitrella patens SEQ ID NO: 113, 114 or 115; Selaginella moellendorffii SEQ ID NO: 116 or 117; and a PRORP enzyme comprising the Brassica napus (rapeseed) sequence SEQ ID NO: 118, 119 or 120.

[0032] According to a preferred embodiment of the invention, the mutant protein-only RNase P enzyme (CytoRP) is able to cleave the aminoacylatable 3′ tRNA-like structure (TLS) of a plant RNA virus belonging to a genus selected from the group consisting of Tymovirus, Furovirus, Pomovirus, Pecluvirus, Tobamovirus, Bromovirus, Cucumovirus and Hordeivirus. More preferably CytoRP is able to cleave the aminoacylatable 3′ TLS of a plant RNA virus selected from the group consisting of Turnip yellow mosaic virus (TYMV), Andean potato latent virus (APLV), Belladonna mottle virus (BeMV), Cacao yellow mosaic virus (CYMV), Clitoria yellow vein virus (CYVV), Eggplant mosaic virus (EMV), Kennedya yellow mosaic virus (KYMV), Okra mosaic virus (OkMV), Ononis yellow mosaic virus (OYMV), Wild cucumber mosaic virus (WCMV), Nemesia ring necrosis virus (NeRNV), Soil-borne wheat mosaic virus (SBWMV), Beet soil-borne virus (BSBV), Potato mop-top virus (PMTV), Indian peanut clump virus (IPCV), Peanut clump virus (PCV), Tobacco mosaic virus (TMV), Cucumber green mottle mosaic virus (CGMMV), Green tomato atypical mosaic virus (GTAMV), Satellite tobacco mosaic virus (STMV), Sunnhemp mosaic virus (SHMV), Brome mosaic virus (BMV), Broad bean mottle virus (BBMV), Cowpea chlorotic mottle virus (CCMV), Cucumber mosaic virus (CMV), Barley stripe mosaic virus (BSMV) and Poa semilatent virus (PSLV). More preferably CytoRP is able to cleave the aminoacylatable 3′ TLS of a plant RNA virus selected from the group consisting of TYMV, TMV and BMV.

[0033] The aminoacylatable 3′ TLS of the above-mentioned plant RNA viruses is known in the art (see for review Dreher, 2010).

[0034] By way of example, the nucleotide sequence of the aminoacylatable 3′ TLS of the TYMV is represented as SEQ ID NO: 237, of the TMV is represented as SEQ ID NO: 238, and of the BMV is represented as SEQ ID NO: 239.

[0035] The cleavage of the aminoacylatable 3′ tRNA-like structure (TLS) of a plant RNA virus by a mutant protein-only RNase P enzyme (CytoRP) according to the present invention can be determined in vitro. In vitro cleavage assays are described in the Examples below, in Gobert et al., 2010 and in Gutmann et al., 2012.

[0036] According to another preferred embodiment of the invention, the mutant protein-only RNase P enzyme (CytoRP) has at least 50% identity, or by order of increasing preference at least 55%, 60%, 65%, 70%, 75%, 80%, 85%, 90%, 91%, 92%, 93%, 94%, 95%, 96%, 97%, 98% or 99% identity with a polypeptide of sequence selected from the group consisting of SEQ ID NO: 121, 122 or 123 (mutants of PRORP enzymes from Oryza sativa wherein the NLS or MTS domain is deleted); SEQ ID NO: 124, 125 or 126 (mutants of PRORP enzymes from Zea mays wherein the NLS or MTS domain is deleted); SEQ ID NO: 127 or 128 (mutants of PRORP enzymes from Triticum turgidum); SEQ ID NO: 129, 130 or 131 (mutants of PRORP enzymes from Solanum lycopersicum wherein the NLS or MTS domain is deleted); SEQ ID NO: 132, 133 or 134 (mutants of PRORP enzymes from Brassica rapa wherein the NLS or MTS domain is deleted); SEQ ID NO: 135, 136 or 137 (mutants of PRORP enzymes from Carica papaya wherein the NLS or MTS domain is deleted); SEQ ID NO: 138, 139 or 140 (mutants of PRORP enzymes from Solanum tuberosum wherein the NLS or MTS domain is deleted); SEQ ID NO: 141, 142 or 143 (mutants of PRORP enzymes from Nicotiana tabacum wherein the NLS or MTS domain is deleted); SEQ ID NO: 144, 145 or 146 (mutants of PRORP enzymes from Setaria wherein the NLS domain is deleted); SEQ ID NO: 147, 148, 149 or 150 (mutants of PRORP enzymes from Sorghum bicolor wherein the NLS domain is deleted); SEQ ID NO: 151 or 152 (mutants of PRORP enzymes from Hordeum vulgare wherein the NLS or MTS domain is deleted); SEQ ID NO: 153 (mutant of PRORP enzyme from Oryza officinalis wherein the NLS domain is deleted); SEQ ID NO: 154, 155 or 156 (mutants of PRORP enzymes from Manihot esculenta wherein the NLS or MTS domain is deleted); SEQ ID NO: 157, 158 or 159 (mutants of PRORP enzymes from Theobroma cacao wherein the NLS or MTS domain is deleted); SEQ ID NO: 160, 161 or 162 (mutants of PRORP enzymes from Cucumis sativus wherein the NLS or MTS domain is deleted); SEQ ID NO: 163, 164, 165 or 166 (mutants of PRORP enzymes from Vitis vinifera wherein the NLS or MTS domain is deleted); SEQ ID NO: 167, 168, 169, 170 or 171 (mutants of PRORP enzymes from Glycine max wherein the NLS or MTS domain is deleted); SEQ ID NO: 172, 173 or 174 (mutants of PRORP enzymes from Prunus persica wherein the NLS or MTS domain is deleted); SEQ ID NO: 175, 176 or 177 (mutants of PRORP enzymes from Malus domestica wherein the NLS or MTS domain is deleted); SEQ ID NO: 178, 179 or 180 (mutants of PRORP enzymes from Fragaria vesca wherein the NLS or MTS domain is deleted); SEQ ID NO: 181, 182 or 183 (mutants of PRORP enzymes from Citrus clementina wherein the NLS domain is deleted); SEQ ID NO: 184, 185 or 186 (mutants of PRORP enzymes from Citrus sinensis wherein the NLS domain is deleted); SEQ ID NO: 187, 188, 189, 190 or 191 (mutants of PRORP enzymes from Populus trichocarpa wherein the NLS or MTS domain is deleted); SEQ ID NO: 192, 193 or 194 (mutants of PRORP enzymes from Eucalyptus wherein the NLS or MTS domain is deleted); SEQ ID NO: 195, 196 or 197 (mutants of PRORP enzymes from Ricinus communis wherein the NLS or MTS domain is deleted); SEQ ID NO: 198, 199 or 200 (mutants of PRORP enzymes from Medicago sativa wherein the NLS or MTS domain is deleted); SEQ ID NO: 201 or 202 (mutants of PRORP enzymes from Lotus wherein the MTS domain is deleted); SEQ ID NO: 203, 204 or 205 (mutants of PRORP enzymes from Aquilegia wherein the NLS or MTS domain is deleted); SEQ ID NO: 206, 207 or 208 (mutants of PRORP enzymes from Eutrema halophila wherein the NLS or MTS domain is deleted); SEQ ID NO: 209, 210 or 211 (mutants of PRORP enzymes from Eutrema parvulum wherein the NLS or MTS domain is deleted); SEQ ID NO: 212, 213, 214 or 215 (mutants of PRORP enzymes from Mimulus wherein the NLS or MTS domain is deleted); SEQ ID NO: 216 (mutant of PRORP enzyme from Jatropha wherein the NLS domain is deleted); SEQ ID NO: 217, 218 or 219 (mutants of PRORP enzymes from Arabidopsis thaliana wherein the NLS or MTS domain is deleted); SEQ ID NO: 220, 221 or 222 (mutants of PRORP enzymes from Arabidopsis lyrata wherein the NLS or MTS domain is deleted); SEQ ID NO: 223, 224 or 225 (mutants of PRORP enzymes from Brachypodium wherein the NLS or MTS domain is deleted); SEQ ID NO: 226, 227 or 228 (mutants of PRORP enzymes from Physcomitrella patens wherein the NLS or MTS domain is deleted); and SEQ ID NO: 229 or 230 (mutants of PRORP enzymes from Selaginella moellendorffii wherein the NLS or MTS domain is deleted).

[0037] Unless otherwise specified, the protein sequence identity values provided herein are calculated using the BLASTP program under default parameters, on a comparison window including the whole sequence of the proteins to be compared.

[0038] Advantageously, CytoRP consists in an amino acid sequence selected from the group consisting of SEQ ID NO: 121 to 230.

[0039] According to another preferred embodiment of the invention, CytoRP is a mutant of an endogenous protein-only RNase P enzyme from said plant to which the method of the invention is applied.

[0040] According to another preferred embodiment of the invention, the method is for increasing the resistance of a plant to a plant RNA virus belonging to a genus selected from the group consisting of Tymovirus, Furovirus, Pomovirus, Pecluvirus, Tobamovirus, Bromovirus, Cucumovirus and Hordeivirus. In particular, said plant RNA virus is selected from the group consisting of Turnip yellow mosaic virus (TYMV), Andean potato latent virus (APLV), Belladonna mottle virus (BeMV), Cacao yellow mosaic virus (CYMV), Clitoria yellow vein virus (CYVV), Eggplant mosaic virus (EMV), Kennedya yellow mosaic virus (KYMV), Okra mosaic virus (OkMV), Ononis yellow mosaic virus (OYMV), Wild cucumber mosaic virus (WCMV), Nemesia ring necrosis virus (NeRNV), Soil-borne wheat mosaic virus (SBWMV), Beet soil-borne virus (BSBV), Potato mop-top virus (PMTV), Indian peanut clump virus (IPCV), Peanut clump virus (PCV), Tobacco mosaic virus (TMV), Cucumber green mottle mosaic virus (CGMMV), Green tomato atypical mosaic virus (GTAMV), Satellite tobacco mosaic virus (STMV), Sunnhemp mosaic virus (SHMV), Brome mosaic virus (BMV), Broad bean mottle virus (BBMV), Cowpea chlorotic mottle virus (CCMV), Cucumber mosaic virus (CMV), Barley stripe mosaic virus (BSMV), Poa semilatent virus (PSLV).

[0041] The term “plant” includes any monocotyledon or dicotyledon plant.

[0042] Advantageously, the invention applies to plants of agronomical interest, such as rice, corn, wheat, tomato, turnip, papaya, rapeseed, potato, tobacco, millet, sorghum, barley, manioc, cocoa, cucumber, vine, soybean, peach, apple, strawberry, clementine, orange, poplar, eucalyptus, ricinus, alfalfa (lucerne), lotus, carrot, pepper, aubergine, zucchini, melon, bean, spinach, lettuce, onion, celery, beet, squash and strawberry, preferably potato, potato, cucumber, tobacco, carrot, pepper, aubergine, zucchini, melon, bean, spinach, lettuce, celery, beet, squash and strawberry, more preferably tobacco, cucumber, tomato, lettuce and onion.

[0043] A preferred method for expressing a mutant protein-only RNase P enzyme (CytoRP) according to the present invention comprises introducing into the genome of said plant a DNA construct comprising a nucleotide sequence encoding said CytoRP, placed under control of a promoter.

[0044] The instant invention also provides means for expressing a mutant protein-only RNase P enzyme (CytoRP).

[0045] This included an isolated polynucleotide encoding a CytoRP as defined above.

[0046] This also includes recombinant DNA constructs for expressing a CytoRP enzyme in a host-cell (e.g., bacteria or plant cell) or a whole plant. These recombinant DNA constructs can be obtained and introduced in said host cell or whole plant by well known techniques of recombinant DNA and genetic engineering.

[0047] Recombinant DNA constructs of the invention include expression cassettes, comprising a polynucleotide encoding a CytoRP as defined above, under control of a transcription promoter functional in a host cell (e.g., bacteria or plant cell).

[0048] Said transcription promoter may be any promoter that is functional in a cell, preferably a plant cell, i.e., capable of directing the transcription of a polynucleotide encoding a CytoRP as defined above in a cell, preferably a plant cell (for review, see Yoshida and Shinmyo, 2000). The choice of the most appropriate promoter depends in particular on the organ(s) or on the tissue(s) targeted for the expression. The promoter may be a constitutive promoter (i.e., a promoter which is active in most tissues and cells and under most environmental conditions), a cell-type-specific promoter (i.e., a promoter which is active only or mainly in certain tissues or certain types of cells) or an inducible promoter (i.e., a promoter which is activated by physical processes or chemical stimuli). The promoter may also be the promoter of a PRORP gene, such as the A. thaliana PRORP2 promoter included in SEQ ID NO: 231.

[0049] By way of non-limiting examples of constitutive promoters which are commonly used in plant cells, mention may be made of the cauliflower mosaic virus (CaMV) 35S promoter, the NOS (nopaline synthase) promoter, the PG10-90 synthetic promoter, preferably the 35S promoter.

[0050] By way of non-limiting examples of organ-specific or tissue-specific promoters, mention may be made of promoters such as the pollen specific APRS promoter, the embryo specific MXL promoter (Jopcik et al., 2013) or any plant promoter as listed in the plant promoter database PlantProm (Shahmuradov et al., 2003).

[0051] By way of non-limiting examples of inducible promoters, mention may be made of the ethanol inducible AlcR/AlcA and the β-estradiol inducible XVE/OlexA inducible systems (Borghi, 2010).

[0052] Said recombinant expression cassette may also comprise a transcription terminator, such as, for example, the CaMV 35S terminator, the NOS terminator or the T9 terminator of the rbcS E9 gene. The terminator may also be the terminator of a PRORP gene, such as the A. thaliana PRORP2 terminator included in SEQ ID NO: 232.

[0053] Said recombinant expression cassette may also include other regulatory sequences, such as transcription enhancer sequences.

[0054] Recombinant DNA constructs of the invention also include recombinant vectors containing an expression cassette comprising a polynucleotide encoding a CytoRP as defined above. In particular said expression cassette is a recombinant expression cassette of the invention, wherein the polynucleotide encoding a CytoRP is under control of a promoter of a PRORP gene.

[0055] The expression cassettes and the expression vectors according to the invention may also comprise other sequences, usually employed in constructs of this type, such as translation leader (TL) sequences, polyadenylation sites, and also, where appropriate, amplifying sequences (transcription enhancer sequences). They may also comprise sequences which make it possible to monitor the transformation, and also to identify and/or to select the cells or organisms transformed. These are, in particular, reporter genes (for example the beta-glucuronidase (GUS) gene, the luciferase gene or the green fluorescent protein (GFP) gene, conferring an easily recognizable phenotype on these cells or organisms, or else selection marker genes (for example, genes for resistance to an antibiotic, such as kanamycin or hygromycin, or to an herbicide).

[0056] The choice of the promoter and of the additional sequences that can be inserted into the expression cassettes and vectors according to the invention can be made, conventionally, by a person skilled in the art according in particular to criteria such as the host vector, host cells and organisms chosen, the desired expression profile in the host cell or organism, the genetic transformation protocols envisioned, etc.

[0057] The selection of suitable vectors and the methods for inserting DNA constructs therein are well known to a person skilled in the art. The choice of the vector depends on the intended host and on the intended method of transformation of said host.

[0058] A variety of techniques for genetic transformation of plant cells or plants are available in the art. By way of non-limiting examples, one can mention methods of direct transfer of genes such as direct micro-injection into plant embryoids, vacuum infiltration or electroporation, or the bombardment by gun of particules covered with the plasmidic DNA of interest. Agrobacterium mediated transformation methods may also be used such as Agrobacterium tumefaciens or Agrobacterium rhizogenes.

[0059] The present invention also provides a host cell comprising an expression cassette or a recombinant vector as defined above.

[0060] The host cells can be prokaryotic or eukaryotic cells. In the case of prokaryotic cells, they may be agrobacteria such as Agrobacterium tumefaciens or Agrobacterium rhizobium. In the case of eukaryotic cells, they may be plant cells stemming from dicotyledonous or monocotyledonous plants.

[0061] The invention also provides a method for producing a transgenic plant, having an increased resistance to a plant RNA virus.

[0062] Various methods for obtaining transgenic plants are well known in themselves to a person skilled in the art.

[0063] In particular, said method comprises transforming a plant cell by a DNA construct of the invention and regenerating from said plant cell a transgenic plant expressing a CytoRP as defined above.

[0064] According to a preferred embodiment of this, it comprises transforming a plant cell with a recombinant vector of the invention comprising a polynucleotide encoding a CytoRP as defined above, and regenerating from said plant cell a transgenic plant expressing a CytoRP.

[0065] A very large number of techniques for transforming plant germinal or somatic cells (isolated, in the form of tissue or organ cultures, or on the whole plant), and regenerating the plants are available. The choice of the most suitable method generally depends on the plant concerned.

[0066] The invention also comprises plants genetically transformed by a recombinant DNA construct of the invention, such as an expression cassette, and expressing a CytoRP as defined above, and in particular transgenic plants comprising, in their nuclear genome, at least one copy of a transgene containing a recombinant DNA construct of the invention according to the invention. In said transgenic plants a DNA construct of the invention is comprised in a transgene stably integrated in the plant genome, so that it is passed onto successive plant generations. Thus the transgenic plants of the invention include not only the plants resulting from the initial transgenesis, but also their descendants, as far as they contain a recombinant DNA construct of the invention. The expression of a CytoRP as defined above in said plants provides them an increased resistance to a plant RNA virus, when compared with a wild-type plant devoid of said transgene(s).

[0067] The invention also comprises a transgenic plant, obtainable by a method of the invention, expressing a CytoRP as defined above, said plant containing a recombinant expression cassette of the invention.

[0068] The invention further comprises a transgenic plant or an isolated organ or tissue thereof (such as seeds, leafs, flowers, roots, stems, ears) comprising, stably integrated in its genome, a recombinant expression cassette comprising a polynucleotide encoding a CytoRP as defined above.

[0069] The present invention also provides an isolated mutant protein-only RNase P enzyme (CytoRP) comprising neither a nuclear localization signal (NLS) domain nor an organelle targeting sequence (MTS) domain, and able to cleave the aminoacylatable 3′ tRNA-like structure (TLS) of a plant RNA virus, as defined above.

[0070] Advantageously, CytoRP has at least 50% identity, or by order of increasing preference at least 55%, 60%, 65%, 70%, 75%, 80%, 85%, 90%, 91%, 92%, 93%, 94%, 95%, 96%, 97%, 98% or 99% identity with a polypeptide of sequence selected from the group consisting of SEQ ID NO: 121 to 230.

[0071] The present invention also provides the use of an isolated polynucleotide encoding a CyroRP as defined above for producing a transgenic plant having an increased resistance to a plant RNA virus as defined above.

[0072] Foregoing and other objects and advantages of the invention will become more apparent from the following detailed description and accompanying drawing, which refers to non-limiting examples illustrating the use of a CytoRP for increasing the resistance of a plant to a plant RNA virus. It is to be understood however that this foregoing detailed description is exemplary only and is not restrictive of the invention.

[0073] FIG. 1: Features defining PRORP enzymes. Schematic representation of a PRORP enzyme with residues predicted to play an important role highlighted and numbered according to Arabidopsis PRORP2 sequence.

[0074] FIG. 2 (A-I) Schematic representation of residue frequency at each position in an alignment of 91 plant PRORP sequences, representing the consensus amino acid sequence of PRORP. The alignment has been obtained with the software LogoBar (Perez-Bercoff et al., 2006; http://www.biosci.ki.se/groups/tbu/logobar).

[0075] FIG. 3: The fusion of CytoRP with eYFP observed by confocal microscopy shows the cytosolic localization of CytoRP. This location differs from the nuclear localization of PRORP2/3 and the organellar localization of PRORP1 (Gobert et al., 2010). “C” shows location controls with the auto-fluorescence of chlorophyll revealing chloroplasts and DAPI staining (for PRORP2/3) revealing DNA in the nucleus. “T” shows cells in transmitted light.

[0076] FIG. 4: Cytosolic localization of CytoRP (mutant AtPRORP2 wherein the NLS domain is deleted) determined by laser scanning confocal microscopy. Four representative experiments are shown where the construct expressing CytoRP-eYFP fusion was transformed into Arabidopsis protoplasts. In each experiment, the respective panels show for each cell, the eYFP signal, the autofluorescence of chlorophyll showing chloroplasts, the transmitted light image of cells and the merged image of the eYFP and the autofluorescence channels.

[0077] FIG. 5: Transformed plants encoding CytoRP (mutant AtPRORP2 wherein the NLS domain is deleted) were identified by PCR using total genomic DNA from plant extracts and oligonucleotides P2-5′UTR-F (SEQ ID NO: 135) and P2-R (SEQ ID NO: 136) present in AtPRORP2 5′ UTR region and in its coding region respectively. Lanes 1, 2, 3 and 4 correspond to PCR reactions performed on plant genomic DNA. Lanes 5 and 6 correspond to PCR reactions performed on cDNA clones representing PRORP2 and PRORP2ΔNLS (CytoRP) respectively, serving as PCR positive controls and size references. M shows the molecular weight marker. DNA fragments were separated on a 1% agarose gel, stained with ethidium bromide and visualised under UV light. 1, 2 and 3 correspond to wild type plants that encode PRORP2, whereas 4, highlighted by an asterisk, corresponds to a CytoRP plant that expresses PRORP2ΔNLS.

[0078] FIG. 6: RNase P activity assays of Arabidopsis CytoRP on in vitro synthesized transcripts representing tRNA like structures of plant viruses TYMV, TMV and BMV. (−) indicate lanes with TLS transcripts alone and (+) indicate lanes where transcripts were incubated with CytoRP proteins resulting in specific cleavage patterns.

[0079] FIG. 7: PCR sample of 2 μl (from the 50 μl) mixed with water (3 μl) and 6×DNA loading dye (1 μl) and charged into a 1% agarose gel. 4.5 μl MassRuler (Thermo Scientific) was used for size determination. P=PRORP.

[0080] FIG. 8: 1% agarose gel is prepared and 5 μl PCR product was loaded. 4.5 μl Mass-Ruler was added for size determination. (A) Gel 1 shows for N. tabacum PRORP1 that colonies 1, 2 and 6 have the right size amplification for NtPRORP1, for N. tabacum PRORP2 that none of the colonies have NtPRORP2. (B) Gel 2 shows for N. tabacum PRORP3 that colony 1 has the right size amplification for NtPRORP3, for C. sativus PRORP3 that colonies 1, 2, 3, 5, 6 and 8 have the right size amplification for CsPRORP3. (C) Gel 3 shows for A. cepa PRORP3 that colonies 2, 3, 4, 5, 6, 8, 10, 11, 12 have about the right size amplification for CsPRORP3, for L. sativa PRORP3 that colonies 3 and 7 have the right size amplification for LSPRORP3, for a new transformation of pGEM-T easy:N. tabacum PRORP3 in E. coli TOP10 that colonies 3, 5, 6, 8, 9, 11, 12 have the right size amplification for NtPRORP3, for S. lycopersicum PRORP3 that colonies 1, 4, 6, 7, 8, 10 and 12 have the right size amplification for S1PRORP3.

### EXAMPLE I: EXPERIMENTAL VALIDATION OF THE USE OF CYTORP FOR INCREASING THE RESISTANCE OF A PLANT TO A PLANT RNA VIRUS

### I. Methods

[0081] CytoRP Enzyme

[0082] The CytoRP protein (SEQ ID NO: 218), whose construction is described here, derives from the Arabidopsis PRORP2 protein (At2g16650). Its coding sequence corresponds to nucleotides 73 to 1587 of the native PRORP2 cDNA, preceded by an ATG initiation codon. CytoRP is the result of the deletion of the first 24 amino acids of PRORP2 (corresponding to the NLS domain). CytoRP is a protein of 505 amino acids with a molecular weight of 56539.73 Da with an isoelectric point of 7.06.

[0083] Localization Experiments

[0084] CytoRP cDNA (SEQ ID NO: 233) was inserted into the pART7eYFP vector (Gleave, 1992). Arabidopsis mesophyll protoplasts were isolated and transformed with pART7CytoRPeYFP plasmids as described previously (Abel and Theologis, 1994).

[0085] Briefly, plant material was put in Plasmolysis solution containing 0.4 M mannitol, 3% sucrose and 8 mM CaCl₂ and incubated 30 min at room temperature (RT). Cells were spun at 42 g for 10 min at RT, resuspended in Enzyme solution containing 1% (w/v) cellulase and 0.25% (w/v) macerozyme diluted in Plasmolysis solution and incubated in the dark at RT for 1 h and for a further 1 to 2 h on an orbital shaker at 20 rpm. The obtained protoplasts were filtered through a nylon sieve (100 μm), washed by adding 30 ml of 0.4 M mannitol in W5 solution (5 mM glucose, 154 mM NaCl, 125 mM CaCl₂, 5 mM KCl and 1.5 mM MES pH 5.6) and spun at 42 g for 10 mM at RT. Protoplasts were then washed twice by adding 10 ml of mannitol/Mg solution (0.4 M mannitol, 0.1% MES and 15 mM MgCl₂) and finally re-suspended in 10 ml of mannitol/Mg solution.

[0086] To transform protoplasts, 50 μg of plasmid DNA were mixed to 250 μg of herring sperm carrier DNA, cleaned by three cycles of phenol/chloroform extractions and ethanol precipitations, re-suspended in 50 μl of H₂O and mixed with 25 μl of chloroform. This solution was deposited in droplets on a petri dish next to 300 μl of protoplast solution (2.10⁶ protoplasts) and 350 μl of PEG. The protoplasts were mixed to the DNA by gentle swirls to the plate. The PEG was injected at once by fusing the drop of DNA/protoplasts to the drop of PEG. Protoplasts were then diluted with 600 μl, 1 ml, 2 ml and 4 ml of 0.4 M mannitol in W5 solution added in droplets every 3 min. The diluted protoplasts were harvested by spinning at 20 g for 5 min at RT. Transformed protoplasts were re-suspended in 2 ml of culture medium (0.4 M sucrose, 1× Murashige and Skoog basal media and 250 mg/l xylose) and cultivated in the dark at 20° C. for 48 h.

[0087] Transformed protoplasts were visualised by confocal microscopy. eYFP fluorescence was observed by confocal laser scanning microscopy using a Zeiss LSM510 based on an Axiovert 200M microscope (Zeiss).

[0088] Arabidopsis Stable Transformation

[0089] A PCR amplified DNA fragment (SEQ ID NO: 234) containing CytoRP cDNA sequence (SEQ ID NO: 233) as well as AtPRORP2 promoter (SEQ ID NO: 231) and terminator (SEQ ID NO: 232) sequences was cloned in the binary vector pGWB13 (Nakagawa et al., 2007). The construct obtained was used to transform Arabidopsis thaliana ecotype col0 plants by the “floral dip” method (Clough and Bent, 1998).

[0090] Briefly, the pGWB13 construct, carrying the CyoRP insert as well as a hygromycin resistance marker gene, was transformed in Agrobacterium tumefaciens strain GV3101 cells. Bacteria were grown at 28° C. in liquid LB medium until OD₆₀₀=0.8, centrifuged and resuspended in 5% Sucrose and 0.05% Silwet L-77 solution. Aerial parts of Arabidopsis plants were dipped 3 times in the Agobacterium solution for 3 seconds with gentle agitation. Dipped plants were then placed under cover for 24 hours to maintain high humidity and grown according to standard conditions. Dry seeds were harvested and next generation individual plants analysed to test for their resistance to hygromycin and thus to identify individual transformants.

[0091] RNase P Activity Assays

[0092] Production of Recombinant PRORP Enzymes

[0093] PRORP cDNAs were cloned in pET28-b(+) (Novagen) to obtain C terminal fusions with histidine affinity tags. Proteins were expressed over night at 18° C. in BL21(DE3) E. coli cells induced with 1 mM IPTG. Bacteria were lysed and centrifuged 30 min at 30,000 rpm 4° C. The cleared bacterial lysates were incubated with the Ni NTA resin (Qiagen). The bound proteins were washed with buffers containing 50 mM imidazole, 20 mM MOPS pH 7.8, 150 mM NaCl and 15% (v/v) glycerol and 75 mM imidazole, 20 mM MOPS pH 7.8, 250 mM NaCl and 15% (v/v) glycerol. Proteins were eluted from the column using 200 mM imidazole and 500 mM imidazole buffers.

[0094] Production of Transcripts Representing tRNA Like Structures

[0095] cDNAs representing TLS containing RNAs were amplified by PCR using 5′ oligonucleotides containing T7 promoter sequences. PCR products were cloned in pUC19.

[0096] 200 ng of linearized plasmid DNA were transcribed in a volume of 10 μl containing 7.5 mM rNTP, 5 U T7 RNA polymerase and buffer as supplied by the manufacturer (RiboMAX, Promega) for 4 h at 37° C. After this, plasmid DNA was digested with 1 U of RQ1 DNase for 15 min at 37° C. and synthesized RNA were purified by phenol chloroform extractions. Transcripts were dephosphorylated with 1 U FastAP Alkaline Phosphatase (Fermentas) for 30 min at 37° C. and 5′ radiolabelled with ³²P-γATP and polynucleotide kinase (Fermentas).

[0097] Cleavage Assays

[0098] Reactions were performed essentially as described previously (Gobert et al., 2010) with proteins purified as described (Gobert et al., 2010). Reactions were performed in 10 μl with 100 ng proteins and 100 ng 5′ radiolabelled RNA, in buffer containing 20 mM Tris-HCl pH 8, 30 mM KCl, 4.5 mM MgCl₂, 20 μg/ml BSA and 2 mM DTT, for 15 min at room temperature. RNA molecules were separated on 8% polyacrylamide urea gels and visualized by ethidium bromide staining and/or by autoradiography.

[0099] Validation of the Antiviral Strategy

[0100] The degree of resistance of transgenic plants expressing CytoRP to model viruses containing a TLS is determined. For this, transgenic plants expressing CytoRP as well as control wild-type plants are infected with preparations of TLS (RNA) viruses. After infection, a comparative quantitative analysis of viral titer is performed over time. Viral titer is followed by immuno-detection using antibodies specific for viral proteins.

[0101] 2. Results

[0102] To determine the localization of CytoRP in vivo, its cDNA was cloned into the vector pART7eYFP, thus inducing the fusion of CytoRP with the fluorescent protein eYFP (Gleave, 1992). Protoplasts of Arabidopsis cells were transformed transiently with the construct expressing the CytoRP-eYFP fusion. eYFP fluorescence was visualized by confocal laser scanning microscopy using a Zeiss LSM510 microscope. This revealed that the CytoRP protein is indeed localized in vivo in the cytosol of Arabidopsis cells (FIG. 3 and FIG. 4).

[0103] As a second step, it was built plants with CytoRP stably encoded in the genome. For this, a DNA fragment was generated where the CytoRP cDNA is inserted between the promoter sequence of AtPRORP2 in vivo (positions −1000 to −1 upstream of the native of AtPRORP2 initiation codon) and the terminator sequence of AtPRORP2 in vivo (positions +1 to +118 downstream of the AtPRORP2 termination codon). Promoter and terminator sequences were amplified from Arabidopsis thaliana genomic DNA. The resulting fragment was cloned in the binary vector pGWB13 (Nakagawa et al., 2007). The construct obtained was used to transform Arabidopsis thaliana ecotype col0 plants by the “floral dip” method (Clough and Bent, 1998). Transformed plants coding for CytoRP were identified by PCR using total genomic DNA from transformed plants extracts (FIG. 5). The selected plants thus contain all the PRORP genes encoded by the nuclear genome as well as CytoRP, expressed at the same level as AtPRORP2 and located in the cytosol.

[0104] Despite the removal of the NLS domain from AtPRORP2, CytoRP retains all the elements necessary for RNase P activity, especially the PPR domain responsible for RNA substrates binding and the NYN domain responsible for the catalytic activity of PRORP.

[0105] Transgenic Arabidopsis plants expressing CytoRP, a protein localized in the cytosol and holding RNase P activity, were constructed. This activity leads to the cleavage of tRNA-like structures (TLS) of plant viruses and thus generates plant resistance to TLS containing viruses.

[0106] RNase P activity assays of Arabidopsis CytoRP on in vitro synthesized transcripts representing tRNA like structures of plant viruses were carried out. Transcripts representing the 3′ termini of TYMV, TMV and BMV genomic RNA tRNA like structures (TLS) were generated by T7 transcription in vitro and put in presence of Arabidopsis CytoRP proteins to test for RNase activity. The results are shown in FIG. 6.

### EXAMPLE II: AMPLIFICATION AND CLONING OF CYTORP CDNA SEQUENCES OF REPRESENTATIVE SPECIES OF AGRONOMICAL INTEREST

[0107] The CytoRP sequences from various agronomic relevant plants were amplified using the primers containing the restriction site NcoI (CCATGG) and XhoI (CTCGAG) for digestion and ligation in the plasmid pET28b. These sequences and primers were as follow:

[0108] Tobacco

[0109] Nicotiana tabacum CytoRP based on NtPRORP1 cv Samsun NN, genome “T” (mts deleted): SEQ ID NO: 240.

[0110] Primer forward: SEQ ID NO: 241

[0111] Primer reverse: SEQ ID NO: 242

[0112] The deleted part of NtPRORP1 (genome T) gene is presented in SEQ ID NO: 243. Only the 5′ (N-terminus) of the gene (protein) is presented in SEQ ID NO: 243. The 3′ (C-terminus) was not changed except the removal of the stop codon to fuse the gene with a 6×His tag.

[0113] Cucumber

[0114] Cucumis sativus CytoRP based on CsPRORP3 (N-terminus nls deleted): SEQ ID NO: 245.

[0115] Primer forward: SEQ ID NO: 246

[0116] Primer reverse: SEQ ID NO: 247

[0117] The deleted part of CsPRORP3 gene is presented in SEQ ID NO: 248. Only the 5′ (N-terminus) of the gene (protein) is presented in SEQ ID NO: 248. The start codon was followed by ggc for glycine in order to accommodate the NcoI restriction site. The 3′ (C-terminus) was not changed except the removal of the stop codon to fuse the gene with a 6×His tag.

[0118] Tomato

[0119] Solanum lycopersicum CytoRP based on S1PRORP3 (N-terminus nls deleted): SEQ ID NO: 250

[0120] Primer forward: SEQ ID NO: 251

[0121] Primer reverse: SEQ ID NO: 252

[0122] The deleted part of S1PRORP3 gene is presented in SEQ ID NO: 253. Only the 5′ (N-terminus) of the gene (protein) is presented in SEQ ID NO: 253. The 3′ (C-terminus) was not changed except the removal of the stop codon to fuse the gene with a 6×His tag.

[0123] Lettuce

[0124] Lactica sativa CytoRP based on LsPRORP3 (N- & C-termini nls deleted): SEQ ID NO: 255

[0125] Primer forward: SEQ ID NO: 256

[0126] Primer reverse: SEQ ID NO: 257

[0127] The deleted parts of the LsPRORP3 gene are presented in SEQ ID NO: 258 (N-terminus) and SEQ ID NO 260 (C-terminus). Only the 5′ (N-terminus) and 3′ (C-terminus) of the gene (protein) are presented SEQ ID NO: 258 and SEQ ID NO 260 respectively. The remaining part of the gene (protein) was not changed.

[0128] Onion

[0129] Allium cepa CytoRP based on AcPRORP3 (C-terminus nls deleted): SEQ ID NO: 262.

[0130] Primer forward: SEQ ID NO: 263

[0131] Primer reverse: SEQ ID NO: 264

[0132] The deleted part of AcPRORP3 gene is presented in SEQ ID NO: 265. Only the 3′ (C-terminus) of the gene (protein) is presented in SEQ ID NO: 265. The 5′ (N-terminus) was not changed except the addition of a gcg codon for alanine directly after the start codon of the gene contained in the NcoI restriction site.

### EXAMPLE III: TOTAL RNA EXTRACTION FROM PLANTS, DNASE TREATMENT AND REVERSE TRANSCRIPTION

[0133] TRIzol® RNA Isolation Reagents (LifeTechnology) was used to extract RNA from plant samples.

[0134] Plants material was leaves from each plant.

[0135] Mortar and pestle were frozen using liquid nitrogen.

[0136] Leaf material (about 3 g) was ground to powder in liquid nitrogen.

[0137] Then, TRIzol (3 to 4 ml) was added to the powder. The powder was mixed with the TRIzol by inverting the tube and left 5 minutes on the bench at room temperature. Aliquotes of 1 ml were transferred in 2 ml tubes and 0.2 ml chloroform was added and the tubes were put on vortex thoroughly for 1 min. Then, the tubes were left 5 minutes on the bench at room temperature and centrifuged full speed for 10 min at 4° C. The supernatant (600 μl) was transferred in a new RNase free tube. 300 μl isopropanol was added, the tube inverted few times and then left 15 minutes on the bench at room temperature. The tubes were centrifuged full speed for 15 min at 4° C. The supernatant was removed, the pellet was washed with 1 ml 75% cold ethanol. The supernatant was removed, the pellet dried and resuspended in 20 μl RNase free mQ water.

[0138] Total RNA concentration was determined using the nanodrop 2000 (Thermo Scientific).

[0139] 15 μg or 10 μg of total RNA was used for DNase I treatment in order to get rid of residual genomic DNA contamination. 10 μl DNase I buffer+MgCl2 10× and 10 μl DNase I (1 unit/μl) (Thermo Scientific) were added in a total volume of 100 μl.

[0140] The tubes were incubated 30 min at 37° C.

[0141] A RNA phenol/chloroform extraction was then operated. 100 μl phenol/chloroform was added to the reaction and vortex thoroughly for 20 sec. The tubes were centrifuge full speed at room temperature for 5 min.

[0142] The aqueous supernatant was transferred into a new RNase free tube and the RNA was precipitated with ethanol (10 μl 3 M Na Acetate pH5.3 and 250 μl absolute ethanol).

[0143] The tubes were left 1 hour at −20° C. and then centrifuged full speed for 30 minutes at 4° C.

[0144] The supernatant was removed, and 1 ml 75% ethanol was added to wash the pellet.

[0145] The tubes were centrifuged full speed for 5 minutes at 4° C. and the supernatant removed.

[0146] The pellet was dried and re-suspended in 10 μl RNase free mQ water.

[0147] 3 to 5 μg of total RNA were used for the first strand cDNA synthesis.

[0148] Maxima Reverse Transcriptase (Thermo Scientific) at 200 U/μl supplied with 5×RT buffer were used.

[0149] A mix of oligo(dT)₁₈ and random primer was used for the first strand cDNA synthesis.

[0150] The reactions were performed with the provider specifications.

[0151] Typical first strand cDNA synthesis is as follow:

| | 1 reaction | |
|---|---|---|
| RNA treated DNase I (5 μg) | 5 | μl |
| Oligo(dT)₁₈ (100 μM) | 0.5 | μl |
| Random Primers (0.2 μg/μl) | 0.5 | μl |
| dNTP | 1 | μl |
| H2O | 7.5 | μl |

[0152] The PCR tube containing the mix is incubated at 65° C. for 5 min then put on ice for 2 min.

[0153] After a short spin in a bench-top centrifuge, the following mix is added in the tube:

| | | |
|---|---|---|
| Buffer Maxima RT 5x | 4 | μl |
| RNase OUT 40 U/μl | 0.5 | μl |
| (Invitrogen) | | |
| Maxima RT enzyme | 1 | μl |

[0154] The PCR tube containing the mix is centrifuged shortly and incubated 10 min at 25° C., 45 min at 50° C. and the enzyme is inactivated at 85° C. for 5 min.

[0155] The cDNA is then ready for use in PCR reaction.

[0156] 1 to 2 μl cDNA produced were used to amplify PRORP coding sequences with the primers listed below:

[0157] Primers were designed and ordered at Integrated DNA Technologies (IDT) to amplify cDNA of PRORP from tobacco Nicotiana tabacum (Nt), cucumber Cucumis sativus (Cs), lettuce Lactuca sativa (Ls), tomato Solanum lycopersicum (Sl) and onion Allium cepa (Ac).

| | | |
|---|---|---|
| NtP1F | gtcattcatatccccagcaatg | SEQ ID NO: 267 |
| NtP1R | ccctcggagtcgatcaatttat | SEQ ID NO: 268 |
| CsP3F | ctacagatacttctggaatggattc | SEQ ID NO: 269 |
| CsP3R | ggactcggccacatagcta | SEQ ID NO: 270 |
| LsP3F | gcaaggagaacttactcaacaatg | SEQ ID NO: 271 |
| LsP3R | tgtgacaaaaaacccaagtttcta | SEQ ID NO: 272 |
| S1P3F | gccattactaccggaaaatg | SEQ ID NO: 273 |
| S1P3R | gttctggaaaaggtatcaccttc | SEQ ID NO: 274 |
| AcP3F | ctcagtcgacccagaaaagtatg | SEQ ID NO: 275 |
| AcP3R | caaaactaacgaccacaaaaatgcta | SEQ ID NO: 276 |

[0158] Typical PCR mix is as follow:

[0159] Components for 1 PCR reaction (μl)

| | |
|---|---|
| 2x Phusion MasterMix | 25 |
| (Thermo Fisher Scientific) | |
| Forward primer | 2.5 |
| Reverse primer | 2.5 |
| cDNA | 1 |
| mQ H2O | 19 |
| Total volume | 50 |

[0160] Typical PCR cycling is as follow:

| | | | |
|---|---|---|---|
| Initial denturation | 98° C. | 30 | sec |
| Denaturation | 98° C. | 10 | sec |
| Hybridization | 60° C. | 10 | sec |
| Elongation | 72° C. | 1 min | 30 sec |
| Final elongation | 72° C. | 5 | min |

[0161] 35 cycles of denaturation, hybridization and elongation were done

[0162] A PCR sample of 2 μl (from the 50 μl) was mixed with water (3 μl) and 6×DNA loading dye (1 μl) and charged into a 1 agarose gel. 4.5 μl MassRuler (Thermo Scientific) was used for size determination. Results are shown in FIG. 7.

[0163] The DNA from the remaining of the PCR was extracted (kit Macherey-Nagel referred as MN hereafter Nucleospin Gel and PCR cleanup).

[0164] The standard protocol of the kit was used and elution was made with 15 μl NE (Tris-HCl pH8,5).

[0165] The purified DNA was quantified with nanodrop 2000.

[0166] The Phusion polymerase producing blunt ends, a A-tailing procedure was done using the protocol of “pGEM-T and pGEM-T Easy vector systems” manual (Promega).

[0167] Typical A-tailing procedure is as follow (in 0.2 ml PCR tubes):

[0168] Components for 1 reaction (μl):

| | |
|---|---|
| H2O mQ | 2.8 |
| Tampon Taq 10x with MgCl2 | 1 |
| dATP (10 mM) | 0.2 |
| Cleaned up DNA from PCR | 5 |
| GoTaq2 (Promega) | 1 |
| Total (μl) | 10 |

Incubation at 70° C. for 20 min in thermocycler.

[0169] The A-tailed product is ligated into the pGEM-T easy vector following the procedure described in the manual of “pGEM-T and pGEM-T Easy vector systems”.

[0170] Typical ligation procedure is as follow (in 0.5 ml tubes):

[0171] Component for 1 ligation (μl):

| | |
|---|---|
| 2x rapid ligase buffer | 2.5 |
| pGEM-T easy vector | 0.5 |
| A-tailed DNA from PCR | 1.5 |
| T4 DNA ligase | 0.5 |
| Total (μl | 5 |

[0172] The tubes were incubated for 3 hours or overnight at room temperature.

[0173] The ligation mix was used for E. coli TOP10 chemo-competent cells transformation.

[0174] Typical transformation procedure is as follow (in 0.5 ml tubes):

[0175] −80° C. conserved E. coli TOP10 chemo-competent cells were thawed on ice for 15 min.

[0176] 2.5 μl of ligation mix is added to the cells in ice and left for 30 min in ice. Heat shock at 42° C. was performed for 45 sec (water bath).

[0177] The tubes were then cool down 2 min in ice.

[0178] 600 μl sterile LB solution was added to the cell transferred into a 13 ml round bottom tube.

[0179] The tubes are incubated at 37° C. on a shaker for 1 hour.

[0180] 200 μl cells are plated on Petri dish containing 25 ml LB agar supplemented with ampicillin and X-gal (in flow hood).

[0181] After drying, the plates are incubated at 37° C. for the night.

[0182] The next morning, plates are placed in the fridge to increase the blue-white screening of the colonies.

[0183] The white colonies (containing an insertion in the LacZ gene) are used for a PCR screening.

[0184] Typical PCR reaction is as follow:

[0185] Components for 1 reaction (μl)

| | |
|---|---|
| H2O mQ | 13.4 |
| Tampon GoTaq 5x with LD (Promega) | 4 |
| MgCl2 (25 mM) (Promega) | 1.2 |
| dNTPs (10 mM) | 0.4 |
| M13 FW (10 uM) | 0.4 |
| M13 RV (10 uM) | 0.4 |
| GoTaq 2 enzyme (Promega) | 0.2 |
| Bacteria from a single colony | bacteria |
| Total volume | 20 |

[0186] Master mixes were prepared to screen for 8 to 16 colonies

[0187] Typical PCR cycling is as follow:

| | | | |
|---|---|---|---|
| Initial denaturation | 95° C. | 3 | min |
| Denaturation | 95° C. | 30 | sec |
| Hybridization | 47° C. | 30 | sec |
| Elongation | 72° C. | 2 min | 30 sec |
| Final elongation | 72° C. | 5 | min |

[0188] 35 cycles of denaturation, hybridization and elongation were done 1% agarose gel is prepared and 5 μl PCR product was loaded. 4.5 μl Mass-Ruler was added for size determination. Results are shown in FIG. 8.

[0189] Plasmid preparations were performed with 3 ml LB ampicillin cultures inoculated with colonies containing CytoRP (overnight cultures). Kit MN, Nucleospin Plasmid QuickPure (Elutions with 30 μl NE).

[0190] The concentration of these samples was determined with Nanodrop 2000.

[0191] Sequence analysis revealed that no single nucleotide polymorphism for the various sequences that could alter the production of the CytoRP is present. Then, the positive plasmids were diluted to 5 ng/μl and were used as PCR templates for the production of the respective CytoRP. For N. tabacum only a PRORP1 clone was used to produce a CytoRP (not PRORP3).

[0192] The primers presented in Example II were used to amplify the CytoRP genes in order to clone them in pET28b expression plasmid.

[0193] Typical PCR mix is as follow:

[0194] Components for 1 PCR reaction (μl)

| | |
|---|---|
| 2x Phusion MasterMix | 25 |
| (Thermo Fisher Scientific) | |
| Forward primer | 2.5 |
| Reverse primer | 2.5 |
| Plasmid (5 ng/μl) | 1 |
| mQ H2O | 19 |
| Total volume | 50 |

[0195] Typical PCR cycling is as follow:

| | | | |
|---|---|---|---|
| Initial denturation | 98° C. | 30 | sec |
| Denaturation | 98° C. | 10 | sec |
| Hybridization | 60° C. | 10 | sec |
| Elongation | 72° C. | 1 min | 30 sec |
| Final elongation | 72° C. | 5 | min |

[0196] 35 cycles of denaturation, hybridization and elongation were done.

### REFERENCES

[0197] Abel and Theologis (1994) Plant J 5, 421-427.
[0198] Altman, S. (2007). Mol Biosyst 3, 604-607.
[0199] Altschul, S. F., et al., (1990). J Mol Biol 215, 403-410.
[0200] Barkan, A., et al., (2012). PLoS Genet 8, e1002910.
[0201] Borghi, L. (2010). Methods Mol Biol 655, 65-75.
[0202] Clough, S. J., and Bent, A. F. (1998). Plant J 16, 735-743.
[0203] Crooks, G. E., et al., (2004). Genome Res 14, 1188-1190.
[0204] Dreher, T. W. (2009). Virus Res 139, 217-229.
[0205] Dreher, T. W. (2010). Wiley Interdiscip Rev RNA 1, 402-414.
[0206] Emanuelsson, O., (2000). J Mol Biol 300, 1005-1016.
[0207] Edgar, R. C. (2004). BMC Bioinformatics 5, 113.
[0208] FAO, WFP and IFAD. (2012). The state of food insecurity in the world 2012. Economic growth is necessary but not sufficient to accelerate reduction of hunger and malnutrition. Rome, FAO.
[0209] Gleave, A. P. (1992). Plant Mol Biol 20, 1203-1207.
[0210] Gobert, A., et al., (2010). Nature struct & molec biology 17, 740-744.
[0211] Gobert, A., et al., (2013). Nat Commun 4, 1353.
[0212] Guerrier-Takada, C., et al., (1988). Cell 53, 267-272.
[0213] Gutmann, B., et al., (2012). Genes Dev 26, 1022-1027.
[0214] Howard, M. J., et al., (2012). Proc Natl Acad Sci USA 109, 16149-16154.
[0215] Jopcik M., et al., (2013). Plant Cell, Tissue and Organ Culture (PCTOC) 113, 387-396.
[0216] Karpenahalli, M. R., et al., (2007). BMC Bioinformatics 8, 2.
[0217] Kelley, L. A., and Sternberg, M. J. E. (2009). Nature Protocols 4, 363-371.
[0218] Lurin, C., et al., (2004). Plant Cell 16, 2089-2103.
[0219] Nakagawa, T., et al., (2007). J Biosci Bioeng 104, 34-41.
[0220] Needleman, S. B., and Wunsch C. D. (1970). J Mol Biol, 48, 443-453.
[0221] Nguyen Ba, A. N. (2009). BMC Bioinformatics 10, 202.
[0222] Perez-Bercoff, A., et al. (2006) Bioinformatics 22, 112-114.
[0223] Shahmuradov, I. A., (2003). Nucleic Acids Res 31, 114-117.
[0224] Small, I. D., and Peeters, N. (2000). Trends Biochem Sci 25, 46-47.
[0225] Small, I., (2004). Proteomics 4, 1581-1590.
[0226] Yoshida, K., and Shinmyo, A. (2000). J Biosci Bioeng, 90, 353-362.

The application's sequence listing, which the Patent Office published only in electronic form, follows.

SEQUENCE LISTING (276 sequences)

SEQ ID NO: 1 - protein, 8 aa, Artificial Sequence
  NYN domain
  VARIANT (1)..(1): /replace = Glu, Thr, His, Asn, Pro or Gly
  VARIANT (2)..(4): hydrophobic amino acids with few exceptions where 1 out of 3 amino acids is nucleophylic
  VARIANT (6)..(6): /replace = Ala
  misc_feature (7)..(7): Xaa can be any naturally occurring amino acid
EAIVDGXN

SEQ ID NO: 2 - protein, 25 aa, Artificial Sequence
  NYN domain
  misc_feature (3)..(17): Xaa can be any naturally occurring amino acid
  VARIANT (18)..(18): /replace = Thr
  misc_feature (19)..(19): Xaa can be any naturally occurring amino acid
  misc_feature (21)..(23): Xaa can be any naturally occurring amino acid
DDXXXXXXXXXXXXXXXSXDXXXDH

SEQ ID NO: 3 - protein, 4 aa, Artificial Sequence
  Zinc-binding module
  misc_feature (2)..(3): Xaa can be any naturally occurring amino acid
CXXC

SEQ ID NO: 4 - protein, 5 aa, Artificial Sequence
  Zinc-binding module
  VARIANT (1)..(1): /replace = Tyr or Phe
  misc_feature (3)..(3): Xaa can be any naturally occurring amino acid
  misc_feature (5)..(5): Xaa can be any naturally occurring amino acid
WHXPX

SEQ ID NO: 5 - protein, 7 aa, Artificial Sequence
  Zinc-binding module
  VARIANT (1)..(1): /replace = Phe
  misc_feature (2)..(2): Xaa can be any naturally occurring amino acid
  MISC_FEATURE (4)..(6): one of the thrree residues may be deleted
  VARIANT (7)..(7): /replace = Lys
WXCXXXR

SEQ ID NO: 6 - protein, 6 aa, Artificial Sequence
  Peptide motif
  misc_feature (3)..(3): Xaa can be any naturally occurring amino acid
  VARIANT (5)..(5): /replace = Phe or Cys
  VARIANT (6)..(6): /replace = Thr
MPXPYS

SEQ ID NO: 7 - protein, 1040 aa, Artificial Sequence
  PRORP consensus amino acid sequence
  MISC_FEATURE (1)..(700): some of the Xaa residues may be deleted
  misc_feature (701)..(702): Xaa can be any naturally occurring amino acid
  misc_feature (733)..(736): Xaa can be any naturally occurring amino acid
  misc_feature (741)..(741): Xaa can be any naturally occurring amino acid
  misc_feature (832)..(832): Xaa can be any naturally occurring amino acid
  misc_feature (845)..(845): Xaa can be any naturally occurring amino acid
  misc_feature (853)..(854): Xaa can be any naturally occurring amino acid
  misc_feature (856)..(856): Xaa can be any naturally occurring amino acid
  misc_feature (881)..(881): Xaa can be any naturally occurring amino acid
  misc_feature (885)..(886): Xaa can be any naturally occurring amino acid
  misc_feature (888)..(888): Xaa can be any naturally occurring amino acid
  misc_feature (891)..(897): Xaa can be any naturally occurring amino acid
  misc_feature (901)..(902): Xaa can be any naturally occurring amino acid
  misc_feature (916)..(1040): Xaa can be any naturally occurring amino acid
XXXXXXXXXXXXXXXXXXXXXXXXXXXXXXXXXXXXXXXXXXXXXXXXXXXXXXXXXXXXXXXXXXXXXXXXXXXXXXXXXXXXXXXXXXXXXXXXXXXXXXXXXXXXXXXXXXXXXXXXXXXXXXXXXXXXXXXXXXXXXXXXXXXXXXXXXXXXXXXXXXXXXXXXXXXXXXXXXXXXXXXXXXXXXXXXXXXXXXXXXXXXXXXXXXXXXXXXXXXXXXXXXXXXXXXXXXXXXXXXXXXXXSXXXGESPSSKKKKKKXXXXXXXXKRESPEGVLRVKLDMCSSKRGDLVGALRLYDXEARSXXNGXXXXIRLSQHHYNVLLYLCSSAASXXXXXXXXXXXXXXXXXXXXXXXXXXXXXXXXXXXXXXXXXXXXXXXXXXXXXXXXXXXXXXXXXXXXXXXXXXXXXXXXXXXXXXXXXXXXXXXXXXXXDESLKNLAXXLQRGFEIFXEQMVSDGXXVPPNEATFTSVARLAAAXXXXKGDGXXXXXDMAFDLVKQMXKSYGIPXPRLRSYGPALFGFCXXKKGEADKAYEVEAHMLESGVVPEEPELAALLKVXXSVEAGRADKVYEYLHKLRTSVRQVSESTAKVIEDWFKXSEKASEVXXGKEXKWDXXXXVGKVREAVVNGGGGWHGQGWLXGKGKWTVKRTNVDXEDGVCKSCGEKLVCIDIDPVETENFAESVASLACEREVKANXXXXXXXFSEFQEWLEKHGPFEAVVDGANVGLYQQNFXXXXFSFSXQLNAVVNELRQRSPSKKWPLIILHNKRVTGGPAENPSNRKLIEKWKNAGALYATPTGSNDDWYWLYAAVKCKCLLVTNDEMRDHLFQLLGXNSFFPRWKERHQXVRYTFSKXXGXLKLHMPPPYSVVIQESEKGSWHVPXIATXXEXDDXXXXXXXLESXXPRTWLCITRASSCXXXXXXXXXXXXXXXXXXXXXXXXXXXXXXXXXXXXXXXXXXXXXXXXXXXXXXXXXXXXXXXXXXXXXXXXXXXXXXXXXXXXXXXXXXXXXXXXXXXXXXXXXXXXXXXXXXXXXXXXXXXXX

SEQ ID NO: 8 - protein, 568 aa, Oryza sativa
MAKSLHWEVRKSYSQDNEAAAIRPTAALLLLFPPHRRTTSLRRSSLPFARPRRHSTTTTTAESHPKPNESNAARRRPRPRLAPEGLLKAKLDMCSRDNDLPTALALYEAAISPDSLIPLSLGHYNCLLYLCANAAAADSSSPDAAQRGFDIFSRMEADGVQPNEATLTILARLAAARRDPAMAFSIVRRMATAGTAPHLRSYGPALFAYCDAGDADGATEVEAHMDASGVVPEEAELAALLRVNSARGRPDQVYRLLHRARVLLRQVADATAQLLESWFASHAASEAGLDHWDATKVKQGLRNGGGGWHGQGWLGKGQWTVARTDMDKDGTCHRCGEKLVCIDIDPSETHSFAESVAQIAINRDANFVKFQKWLECHGPFDAVIDAANVGLYNRNSFSFYEVNRVVNGIQRITKSKKLPLIILHKNRVNGGPAKLPQNQKLLESWQRAGALYATPPGSNDDWYWLYAAVIYRSLLVTNDEMRDHLFQLLGTSFFPRWKENHQVRLTFSGRGWNFHLPPPYSIVIQESEDGSWHVPTTNGDDIEKPRQWICATRKISGKSSQALARAVG

SEQ ID NO: 9 - protein, 719 aa, Oryza sativa
MAMAPLFVPPPHLLFLLPATTSSSPAASLRRLLLPPLSCHARQVLDVMPQGDRVAGPRAAEGAGAKGATAQVGVATREAGTAGRHGRGRHGGGARPWRRGEDRPARGGQHAADDGEVQGTRRGGDLKQRREGRRWTRGETQARESGKAGNSGRCQSNGSGGNASRKGKKKAKGGENEVKLRVELDMCSKRGDVIGAINLYDSAVKEGIKMGQHHYSVLLYLCSSAALGFVQPAKSGNAGSGIASIGQLHSSSTQSVGNLEGDDVQSEGHSEDQEGNKTDLFASDDGTEKPSRIPVSDELREYARTRGFEIFEKMRSEEEKVPMNESALTAVARMAMSMGNGDMAFDVVKQMKDQGIAPKLRSYGPALTAFCNSGNVEKAFEVEAHMLESGVRPEEPELETLLKASVAAQQGDKVYYLLHKFRTTVRQASSTTAKLLEDWFQSPTASKVGKRKWDSGAITKAIENNGGGWHGLGWLGRGKWTISHSHIDRNGACLACGEKLTIIDLDPKETEDFATLVAKLAIKRERRSNFDNFQKWLEKHGPFDAVVDGANVGLFSHKHISLSKINIVADVIRQRFQSRKLPLIVVHNRHLTGERMQKPSNRKLVEKWKLSNAIYATPTGSNDDWYWLYAAIRCKCLMVTNDEMRDHTFQLLERDFFPKWKERHQVRFNFEDSCVTLQMPPPCSVVIQESENGQWHIPVVSEEGSLEKDRTWLCVTRRN

SEQ ID NO: 10 - protein, 548 aa, Oryza sativa
MATAAGASSPARRRPRRGSKGPNSDLSRTLTDCTRRGDAAAAMAAFDSALSGPDAPRLLAHQYNQLFHLLATADADSLPNAAAAARRVFSHMLGSGASPSEATITSLARVTASDASNPAAADEAFDLVATMRDKYGVAPRLRSYSPVLAAFRRAGEAGKAYAVDAHMEASAVAPEEPEIAALLDVSAKAGDADKVYEYMHKLSRTVDCVGEETAEVLEGWFRSGKAAMAGKAEWDACKVKDAIVANGGGCHRLGWLGTGPWTVQRVRVGGDGQCEGCGCRLACVDIDVEETQRFADSVASLALQRETKINFSQFQEWLEEHGAYEAIVDGANIALYQQNFAEGGFSLTQLDAVVTELRDRYNGKWPLVVLHNKRIAKLMENASNRHLIETWRANGALYTSPIGSNDDWYWLYAAIRLNCLLVTNDEMRDHIFELLGSSFFPKWKQRHQVKYTFSKGKAVLMMPPPYSSEIQESEMGSWHVPMEEKSGDDRARIWLCIDRTGHCKHPHEAPAANGVVQDVSPTEASHGCEQRRAEHNGGSLTGKRKDRN

SEQ ID NO: 11 - protein, 553 aa, Zea mays
MRAAMAAAVLRPTAATLRFLSTPPHQRRRVLVGHLPFARRRRHSSTATAPALEDSSPRSGEGKAVRRRRARESPQGLLRHQLDMCSRNADLTTALRLYDDALSPDNPIPLSLHHYNCLLYLCSNAAATDSDSHISATAAQRGFDIFARMEADGVQPNEATLTSVARLAAATRDPAMAFSVVRRMAAAGTPPRLRTYGPALFAYCDAKDADGAKQVEAHMDASGVVPEEPELAALLRVNADTGKADEVYRLLHRTRVLVRQVCDTTAQVVEAWFRSDAASQAGVDSWDPTKVKEGVVKGGGGWHGQGWLGKGAWSVGWTEMGKDGTCQRCGERLVCIDIDPAETDNFANSLTELAIKLEAREDFLSFQSWLRRHGPFDAVIDAANVGLYKSKDFCFSQVNSVVNAIQRVTKSKKLPLIVLHRSRVNVGPAKAPYNQKILDSWRNAGALYATPPGSNDDWYWLYAAVSCRSLLVTNDEMRDHLFQLLGTSFFPRWKEKHQVRLTFSGHGPTLHLPPPYSIVIQESEDGSWHVPTTTGDDIEKPRQWLCTTRKSLR

SEQ ID NO: 12 - protein, 684 aa, Zea mays
MPYRDSRPSGTEGSRAGPGGAPRVTNSSTVRGNATAQEAHMPMWRERTPGTPRTWKKGDRVMLQEHAEGESQEKSWRRGLTRSLESKGPMVRKSWTRDGNGMRAKESGKVGNSRDEGTGRRNACKKMKKPPDGEYAGKLRVELDMCSKRGDVMGAITLYDSAVEEGIKLGQHHYNVLLYLCSSASLGFVQPAKSGNMGSGIASIGPAQKLDPSPSRSLGGSEGDNAYASESHVQDQGKNKADLIPGGLKAQTVSIPVEDELGDYARARGFEIFDKMCSEKERVQMSEAALTAKARMALSMGDSDMAFEIVKQMKGLGLKPKLRSYGPALTAFCNSGNVEKAFEVEAHMLESGITPEEAELETLLRASVVGRRGDKVYYLLHKFRTAVRQVSHSTAELFEAWFRSPTASKVGKRKWDAGAIAKAIENNGGGWHGFGWLGRGKWTVAHSNINENGVCLACGEKLAIIDLDPKETEDFATFVAKLAIKRERKSNFENFQKWLEKHGPFEAVVDAANVGLFSHKHLSLSKVNSVADAIRLRFTSKKWPLIVLHNKHLIGERMKKLNDHKLVQKWKQENSIYATPTGSNDDWYWLYAAIRCKCLIITNDEMRDHTFQILERNFFPKWKERHQVHFTLEDRCVTFQMPPPYSVVIQESDKGHWHIPVSEEGLLEKDRTWLCVTRQNSQAQ

SEQ ID NO: 13 - protein, 521 aa, Zea mays
MASTATTRRRPRRGSKGPNADLSRTLTDCTRLSAHQYNQLLHLLAATDRSSFPSPPAAAARRVFAHMLQAAAPPSEATITSLARVIAADPASAADEAFELVATMKDKYGLSPRLRSYGPVLAAFRRAGEAAKAYAVEAHMTASGVSPEEPELAALLDVSSRAGDADKVYEYMHKLRQAVHCVSEETAGVVEAWFRSDEAATAGKPQWDAAQVKDAIVANGGGCHRLGWLGTGPWTVQRVRVGDADQCGGCRFHLACIDIDMEETQRFADSVAGLALERETKTNFSRFQEWLEANKDYQAIVDGANIALYQQNFAEGGFSLTQLDGVITELRDRYHGKWPLVILHNKRISKLMENSSNRHLIETWRTNGALYTSPSGSNDDWYWLYAAIKLNCLLVTNDEMRDHIFELLGPSFFPKWKQRHRVKYTFNKGKAVLVMPPPYSSELQESEMGSWHIPIEEKSGNERGRIWLCIGRGGSCKEHGEVPSTNGAVHKVPQTEASNVVQQGLTENKDESITGKRKDRD

SEQ ID NO: 14 - protein, 749 aa, Triticum turgidum
MRLAAAAGVLRPTAALLFHSRPHRLLPSPRRSSLPFARRRRDSSSSSTATALDDPPPPSASSPPSPAPPAPTGEGGETKAARRRRARESPAGILRHRLGICSRDADLATALELYADAVDPATAVPLALHHYNCLLYLCSNAAAEDADAARRGFEIFAAMEAQGVEPNEATLTSLARLAAAVRDPAMAFSVVRRMAAAGIPPRLRSYGPALFAYCDARDAHGAAEVEAHMDAGGVVPEETELAALLRVNADTGRADQVYRVLHRTRTLVRQVCEATAQVVEAWFQSDAAAEAGVEKWDARKVREGVVKGGGGWHGQGWLGKGQWDVGQSEMDKNGKCQRCGEKLVCIDIDPSETETFAKSLAELACKREVRDDFVRFQDWLRRNGPFDAVIDAANVGLYNSKAFSFSQVNSVVNGIQRVTKSKKLPLIVLHRSRVNCGPAKAPQNQKLIESWRNAGALYSTPPGSNDDWYWLYAAVSCRSLLVTNDEMRDHLFQLLGTSFFPRWKEKHQVRLTYSGRGPTFHLPPPYSIVIQESETGSWHVPTTTGDDIESPRQWVCATRKTSEGPPSPPPQARVSSKTSERLPSPPPQACATRKTSERPPSPPPQARATRKTSEGPPSPPPQARATSKTSERLPSPQPQARATSKTSERPPSLQPQARATSKTSERPPSPPPQARSTRKTSERPPSPPPQAHGTRKTSERPSSPPSQASATSKTTEGPSSPPSQASATIKTSEGPSSPPPQARLSDLGW

SEQ ID NO: 15 - protein, 552 aa, Triticum turgidum
MASAAAAAGDGTRRKRGLGGKGPNSDLSRTLTDCTRRGDAAAAMAAFDAALSGPDAAPGLRLAAHQYNQLLHLLASADRAAFPARPAAAARRVFAHMLGAGAPPSEATITSLARVVAADDAEGADEAFGLVSTMREKYGLAPRLRSYSPVLAAFRRAGEAGKAYEVEAHMAASAVSPEEPEIAALLEVSAKAGDADKVYEYMHKLRRAVGCVKEETAEVLEGWFESEKAAAAGKAEWDVCQVKDAIVANGGGCHQLGWLRTGPWTVQRVRVGADGECSGCGCRLASVDINMEDTQKFADSISGLALERETKANFSQFQEWLEAHKEYEAIVDGANIALYQQNFAEGGFSLVQLDAVVTELRDRYSGKWPLVILHNKRIAKLMENSSNRHLIETWRANGALYTSPSGSNDDWYWLYAAIGLNCFLVTNDEMRDHIFELLGSSSFFYKWKQRHRVKYTFNKGKAVLVLPPPYSSEIQESETGSWHVPIEEKSGDERARTWLCIGRTDLSKPPREPPVANGVAQDLSPSEASNGAGQRQPEEQAAPVTGKRKDRD

SEQ ID NO: 16 - protein, 567 aa, Solanum lycopersicum
MLVRRMGYISPSLSIKTSPFFSILTKNPFPFHHLHPIQFFKPIHTKSPQTHLFSMNQKPHFTTSAAFLQEPTNTKTLSNRSAKKARRDAPESVLRHQLDQCSKRGDLQEAIRLYEEAKLNNITLNVHHYNVLLYLCSSGSGTEGCGIEKGFLIFKQMGVNGVAPNEATFTSAARLAVAKQDPEMAFDLVKKMKSFGVPPKLRSYGPALFGFCEKGMADKAYEVDVHMGESGVVAEEAELSALLKVSSFSKKADKVYEMMHRLRASVRQVCEETVGVVEDWFNSEYAAEVGLQDWDARKVKEGVVKGGGGWHGQGWLGKGNWTVVRAEMDSSGVCRSCGEKLVCIDIDPKETENFANSLAELASEREVKANFVQFQDWLQKHGPFDAVVDGANVGLITQRNFNFSQLRSVVNKLRQMSESKKLPLVILHKSRTTGGPAQHPNNKKLLESWKKAGALYATPHGSNDDWYWLYAAVSSKGLLLTNDEMRDHLFQLLGTSFFPRWKEKHQIRMTASRDDGLKLHMPPPYSIVIQESEQGCWHIPTLTGDDLEIPRQWVCATRKKALHSVFR

SEQ ID NO: 17 - protein, 768 aa, Solanum lycopersicum
MASIPFKPTTQFQLQLYSSTILLNPFKFHTSLPRISSSVHVTHVETQTTEQEISHTRRDGKTNSNENGSGFSSFTPKYKKSYSGQENGANRVVLKDRNAKLKPKRRSSTTTTSNNKAVESKKSKIDSTLRIGLDMCSKRGDVLSAIKLYDLALLQGIVMGQYHYAVLLYLCASAATGLIHPAKSGSVNRTLNAPNEQEFSLNDKVIEHDSHLLSSSTVDEFVQFMKSSAKSVRHDDNGIKVSEDVRHYALTRGFEIYEKMLSDKVQINEATLTSVARMAMALGNGDMAFDVVKKMKEDGINPKLRSYAPALSVFCNNGDVDKAFIVEQHMLENGIYPEELELEALLKVSIEAERSEKVYYLLHKLREGVRQVSPSTADLIDKWFNSKVASRVGKRKWDVRSIHKAIKNGGGGWHGQGWLGNGKWTVSHGIVGSDGCCKCCAEKLVTIDLDPEETEKFAKSVASIAAQRERNSSFQKFQRWLDYYGPFEAVIDGANVGLYSQRKFRPSKVNAVVNGIRQMLPSKKWPLIVLHNRRITGDKMDEPFNRSLVEKWKNADAIYATPTGSNDDWYWLYAAIKFRCLLVTNDEMRDHLFQLLGNDFFPKWKERHQVRFSFSETGPVFHMPPPCSIVIQESEEGNWHVPIASELESEEERTWLCIRRANSPMAHQDSSRVNISKNVGGPTHKCPPTSSDSPHNKGDAKSSTRRKNQVKVTGKTRGSHCRGKDAPEEMYRSLKNILQPSITSDHCSILPELKAAEELGRCVVDFQI

SEQ ID NO: 18 - protein, 552 aa, Solanum lycopersicum
MDKAKNKKKNLTPEGQFRSSLDNCSKTKDLSTAISLYESAISDASTIRLSSNHFNSFLYICSNSFSDPSTKNDAIQFGFRVFEHMDSCNITPNEATVTAVARLAAATDDGDRAFELAKGVGNCGKLRTYGPALFCFCKMGEADKAYQVEEHMRSLGLQLEEAELAGLLKVSVEKEREEKVYQYLHKLRMSIRSVSDSTAEIIQSWFGGEMATKVGLSNGDMDQVKEVILQNGGGWHGLGWLGKGKWLAQRSQIAPDGRCLSCGEQLVCVDIDRSETERFAESVASLAMEREVHSNFKEFQDWLEKHSDYDAVVDAANVGLFQQNFAAGGFSIAQFVAVVKELHSRSNKWPLVILHKKRVRTLLEDAGYRELLEEWINEKILYGTPFGSNDDWYWLYAAVKCKCLLVTNDEMRDHIFELLGSSFFARWKERHQVKYTFVKGEIKLLMPPTYSVVIQESENGSWHVPLAGEVVEESSRTWLCITRQASCESDNKQLASVVEASEVSEPDQIAACCHSDSFTSQNGGSLNKCSGLAGKRKERSPSPTPSHSSLQS

SEQ ID NO: 19 - protein, 573 aa, Brassica rapa
MLRATCFTPSLSRAYCPLFALFLRIPSVHHPHHPSSSPFRGYHSSLQVKGSRDRRRILVDHNRHLCTIPEAAKQPPASTSENLSRKARKKAIQQSPESMLKQKLDMCSRNGNVLEALRLYDEAKRNGLQLSQYHYNVLLYVCSLTDGEAESPSANPGLSRGFDIFKQMIVDKVVPNEATFTNGARLAVAKDDPEMAFDMVKQMKAFGIQPRLRSYGPALFGFCRKGDAEKAYEVDAHMIESEVVPEEPELTALLKVSMETKNAEKVYETLQRLRDLVRQVSKPTFDAIEEWFESEAAGKAGVEKWDVKRIREGVVSGGGGWHGQGWLGTGKWNVTRTEMDENGVCKCCKEKLVCIDINPVETENFAASLTRLACQKEVKASFNQFQEWLERHGPFDAVIDGANMGLVNQRSFSFFQLNNVVQRFQQISPSKRLPLVILHKSRVVGGPATYPKNRALLEKWKNAGALYATPPGSNDDWYWLYAAVSCKCLLVTNDEMRDHLFQLLGTSFFPRWKEKHQVRISVSREDGLKLHMPPPYSIIIQESEDGRWHVPMSVEDDLQTSRQWLCARRSKTH

SEQ ID NO: 20 - protein, 535 aa, Brassica rapa
MAANGQRRSRQDDESPSNPNKKRKANKNPEKNLLFNLNSCSKSKDLSAALALYDAAVASNEVRLNQQHFQTLLYLCSASISDPCLQTLAVERGYQIFDRMVTSGLTFNEATVTSVARLASAKGDGDYAFEIVKDFASVGGTSIPRLRTYAPALLCFCERLEAEKGYEVEEHMEAAGIALEEAEISALLKASAATSRENKVYRYLHKLRESVGCVCEETSKVIEDWFCGEKAGEVSSDGIGSDVEMLREAVLRNGGGWHGRGWVGEGKWIVKKDNVSSTGRCLSCNEQLACVDTNEVETQKFVDSLVALAMERKAKMISSETKVDFSEFQDWLEKHGDYEAIVDGANIGLYQQNFADGGFSLSQLEGVVNELYHKSGDKKWPLILLHKKRVRTLLENPTHRNLVDEWINNGVLYATPPGFNDDWYWLYAAAKLKCLLVTNDEMRDHIFELLSNSFFQKWKERHQVRYTFTKGNLKLEMPPPFSVVIQESEKGSWHVPVASQNNESSRTWMCISRRSVLDSLMINGKLETSENGDSS

SEQ ID NO: 21 - protein, 515 aa, Brassica rapa
MATSDHPRSRHHRDESPTKPNKKKKASHNQEKNLLVSLHSCSKSKNLSAALSLYDAAIASGDVRLSQQHFQSLLYLCSASLGDPSLQTLAIDRGFQVFERMVGSGISPNEASVTSMARLAAAKGDGDYAFKVVKDIVAVGGVSVPRLRTYAPALLCYCERLEAEKGYEVEEHMEASGIVLEEVEISALLKVSAATGRENKVYRYLHKLREYVGFVSEETSKVIEEWFCSEKASEVVRIGSDVELLRAAALKNGGGWHGLGWVGEGKWVVKKGNVSADGECLSCGEHLACVDTNEVETENFVNSLVALAVERKAKMNSSEPMEDFSEFQEWLEKHGDYEAILDGANIGLYQQNFADGGFSLPQLEAVVKELYSKSGNKKWPLILLHKKRVNALLENPNHRNVVEEWISNDVLYTTPPGSNDDWYWLYAAAKFKCLLVTNDEMRDHIFELLSTSFFQKWKLRHQVRYTFVKGSLKLEMPPPFSVVIQESEKGSWHVPITCKDGEESLRNWMCVTRQS

SEQ ID NO: 22 - protein, 551 aa, Carica papaya
MFKFPLQLFPRNSRRLFLRHSYRSSVASSATWVHRFPMDGRAHLCTAAIAAKKFAVPASDQISNKAKKKARRESPEGVLRYKLDMCSKHGDLVEALHLYDEARREGVQLSQYHYNVILYLCSSGGSSVEVSGDWDGEKDSVLGLKRGFDIFGQMVADKVAPNEATFTSIARLAVAMDDPDKAFDLVKQMTSFGIPPKLRSYGPALFGFCKKGKVDNAYEVDAHMVEAGVMAEEPELSALLKVSADGKKADKVYEMLQRLRATVRQVSESTAEIVEDWFKSDDAATVGVDNWDENLVKEGIVKGGGGWHGQGWLGTGKWNVVRTQMNEKGVCRSCGEKLGCIDINPTETENFATSLTNLACQREVRADFTCFQEWLETHGPFDAVIDGANVGLINQHTLSFNQLNNVVNQLREMSPSKRLPLVILHKSRATGGPAQKPKNKYLLESWKKSGALYATPPGSNDDWYWLYASVSCKCLLVTNDEMRDHLFQLLGTSFFPRWKEKHQIRLSVSRNGLKLHMPPPYSIVIQESENGSWHVPTTTRQWLCATRTRLR

SEQ ID NO: 23 - protein, 828 aa, Carica papaya
MNLRPERQTTSLQSMNERTDENSLETLLSLKLEEKERVEKRFTKDKNGRRKLGFRQRREMDTGNSSLRSKGQKTVIKPLKDADSLAENGKTDKRSKESGVNQKVDKGTKNTSEKKISEKNVRKQPKKNKADSPGFKLRVELDMCSKRGDVTSAIQLYDKALKEEIKLEQYHYSVILYLCSSAAAGVVQPAKSGSISRTLNTLSLSNESYRVNAIELGESMDRSNGNASHTELNINFSNNEQLVGTDGGHFEDIDKMASSGVRFENLGNNCKEEENLIQFPNGSMKPNSQLWGKMGIGDHSNQKHMSGITQDHEILVTEDIKKYALHRGFEIYKKMRLDGVPMNEAILTAVARMAVSTGNGDMAFDMVKLMESLGITPRLRSYSPALSAFCTSGDIDKAFAVEKHMLAHGIHPEEHEIEALLKLSVEAGKGDKVYYLLHKLRTTVRKVLPSTADIIVKWFESEVASRVGKKKWDARLIKEAIENGGGGWHGQGWLGEGKWVVSRTVIGRDAFCKCCGEKLAMIDLDPLETENFAQSVASIARKREKNRSFQKFQKWLDYYGPYEAVIDAANVGLFSQKKFKPSKVNAIVNGMRQMLPSRKWPLIVLHNKRITGPKMNEPANKTLFDKWKNADALYATPTGSNDDWYWLYAAIKFKCLIVTNDEMRDHTFQLLGNDFFPRWKERHQVHFSFSDAGPVFHMPPPYSVVIQESEKGHWHIPIAAEHDYEAERIWLCIARSQSGKMRQTLPAAHQVDLQSLERHLGPSTPTDFNIKSNRSSASMAENGSKETREMYQNLKNILTGPMISNNCSVLSELEAAEKIGDCVIDFQI

SEQ ID NO: 24 - protein, 504 aa, Carica papaya
MASTDCNSRKKRKKNRNPEIDLLVNLQSCSKSKDLTTAISLYDSGISQNIRINQHHFSILLYICAASVTDPSSKSLAIERGFRIFDHMVSSGMSSNEASITSVARLAAAKGDGDYAFALIKDLVANGGLPRLRTYSPALLYFCENLEDGKAYEVEEHMDRMNVSLEEAEMAALLKVSAEVGKEERVYRYLHKLRGSVRCVSKETAKIIENWFSGEKGSAVGNGVEYSATEIREAVSKTGGGWHGLGWLAGRGKWVVRRANVEETGRCCCCGEQLACVDIDEIETEKFANSVAALAMEREAKLNFSDFQDWVEKHAPYEAIVDGANIGLYRQNFADGGFSIPQLDAVVKEMYCRSGNKWPLVILHDKRLRGLLENPSCRKVVEEWMDNGVVYKTPHGSNDDWYWLYAAVKLRCLLVTNDEMRDHIFELLGSSFFLKWKERHQVRYTFPKGSLKLQMPSPYSLAIQESENGSWHVPIASDSSLEYGKSWLCITRPSACASEVQVKS

SEQ ID NO: 25 - protein, 574 aa, Solanum tuberosum
MLVRRMGYFSPSLSIKTSPFFSLLTKTPFPFHHLRPIHFFKPIHTKSPQTHLFSMNRKTHFTTSAAFLQEPTNTKTLSNRSAKKARRDAPESVLRHQLDQCSKRGDLQEAIRLYEEAKLNNITLNVHHYNVLLYLCSSGSGTEGCGIEKGFQIFKQMGVNGVAPNEATFTSAARLAVAKQDPEMAFDLVKKMKSFGVPPKLRSYGPALFGFCEKGMADKAYEVDVHMGESGVVAEEAELSALLKVSSFSKKADKVYEMMHRLRGSVRQVCEETAGVVEDWFNSEFAAEVGLQDWDVRKVKEGVVKGGGGWHGQGWLGKGNWTVVRAEMDSSGACRSCGEKLVCIDIDPKETENFANSLVKLACEREVKANFVQFQDWLQKHGPFDAVVDGANVGLITQRNFNFSQLRSVVNKLRQMSESKKLPLVILHKSRTTGGPAQHPNNKKLLESWKKAGALYATPHGSNDDWYWLYAAVSSKGLLLTNDEMRDHLFQLLGTSFFPRWKEKHQIRMTASRDDGLKLHMPPPYSIVIQESEQGCWHVPTLTGDDLEIPRQWVCATRKKALHSLFRRNGESNH

SEQ ID NO: 26 - protein, 753 aa, Solanum tuberosum
MASIPFKPLQPTQFQFQLQLYSSTILLNPFKLHTTLPRISSSIHVTHVETTEQEISHTRRDSKTNSNENGSGFSSFTPKYKRVDSGQENGAKRVVLKDRNAKLKPKRRTSESSSSSSTNNNKAVESKKSKIDSTLRIGLDMCSKRGDVLSAIRLYDLALLQGIVMGQYHYAVLLYLCASAATGLIHPAKSGSGSRTLNAPNEPSSHNNSNEFNVIDHDSHLLGSSTVDEFVQFMKSSAKRCNLQSVRHDDSGIKVSEDVRHYALTRGFEIYEKMLSDKVQMNEATLTSVARMAMALGNGDMAFHVVKKMKEDGINPKLRSYGPSLSVFCNNGDVDKAFIVEQHMLENGIYPEEPELEALLKVSIEAGRSEKVYYLLHKLREGIRQVSPSTADLIAKWFNSKVASRVGKRKWDVRSIHKAIKNGGGGWHGQGWLGNGKWTVSRAIVGSDGCCKFCAEKLVTIDLDPEETEKFAKSVASIAAKRERNSSFQKFQRWLDYYGPFEAVIDGANVGLYSQRKFRPSKVNAVVNGIRQMLPSKKWPLIVLHNRRITGDKMDEPFNRSLVEKWKNADAIYATPTGSNDDWYWLYAAIKFRCLLVTNDEMRDHLFQLLGNDFFPKWKERHQVRFSFSETGPVFHMPPPCSIVIQESEEGYWHVPIASELESEEERTWLCIRRANSPMANQDSSTVNISKNVGDPTHKCPPTSSDPPHNQGDARSSTRRKNQVKVTGKTHGSHGRELKAAEELGSCVVDFQI

SEQ ID NO: 27 - protein, 551 aa, Solanum tuberosum
MDKAKNKKKNLTPEGQFRLSLDNCSKTKDLSTAISLYESAISEPSTIRLSNNHFNSFLYICSNSFSDPSTKNDAIQFGFRVFEHMGSCNITPNEATVTAVARLAAATDDGDRAFELAKGVGSCGKLRTYGPALFCFCKMGEADKTYQVEEHMRSLGLQLEEAELAGLLKVSVEKEREEKVYQYLHKLRMSIRSVSDSTAEIIQSWFGGEMASKVGLSNWDMDQVKQAILQNGGGWHGLGWLGKGKWLAQRSQIAPDGRCLTCGEQLVCVDIDRAETERFAESVASLAMEREVHSNFKEFQDWLENSDYDAVVDAANVGLFQQNFAEGGFSIAQLVAVVKELHSRSNKWPLVILHKKRVRTLLENAGYRELLEEWINEKILYGTPFGSNDDWYWLYAAVKRKCLLVTNDEMRDHIFELLGSSFFARWKERHQVKYTFVKGEIKLLMPPTYSVVIQESKIGSWHVPLAGEVVEESSRTWLCITRQASCESDNKQHASVVEASQVSELNQIAASCHSGSFTSQNGGSLNKCSGLAGKRKERSPSPTPSHSSLQS

SEQ ID NO: 28 - protein, 537 aa, Nicotiana tabacum
MVFRRMGYFSPCLSKTSPFFSLLTKTPYPFQLPHTIHFFKPIHTKFPHTDPFSMNQKTHLCTSAAFLQQPTSKTFSNSRSTKKARRDAPESVLRHKLDQCSKHGDLQEALRLYEEAKLNNISLNVHHYNVLLYLCSASCTKEFGIEKGFEIFKQMGVNGVTPNEATFTSAARLALAKQDPKMAFDIVKKMKSCGVPPKLRSYGPALFGFCDKGMADNAYEVDIHMGESGVVAEEAELSALEDWFNSECAAEIGVENWDVGKVKEGVVKGGGGSHGQGWLGKGNWSVVRAEMDSSGVCSSCGEKLVCIDIDPKETENFANSLAKLACEREVKANFVQFQEWLQKHGPFDAVVDGANVGLITQRSFNFSQLRNVVNKLRQMSKSNKLPLVILHKSRATGGPAQHPNNKKLLESWKKAGALYATPHGSNDDWYWLYAAVSSKGLLLTNDEMRDHLFQLLGTSFFPRWKEKHQIRMTASRDDGLELHMPPPYSIVIQESEHGCWHVPTVIGDDIEMPRQWVCATRRKALHSLFQPTGESNH

SEQ ID NO: 29 - protein, 581 aa, Nicotiana tabacum
  misc_feature (248)..(248): Xaa can be any naturally occurring amino acid
MASTSYITFKPLQQTQLQLCLCSKHSSTLFHSSFHTLLSPPTKYTPRILPSIQVKAHVTHLETRLSFEPEQEISGSRTNNENSSGFSSFSPKDKMVGMKSSRENLGGKTVILKDRNAKSGLKPKRSRELGSNKSKTETFEKEVRKDGGNRENMEKGSKKSKIDSTFKIGLDMCSKRGDVVGAIRLYELALQEGIAMGPYHYAVLLYLCASAATGVVQPAKSGSGSNRTLNSLDLPKGSTSVKIKASSXGKVTNLTNMLSFSSDTNCQTLDELVQLFESRAEASNTISDHGIKVSEDVKHYALKYGFEIYEKMRSEKVQMNEATLTSVARMAMALGNGNMAFDVVRLIKEYGINPRLRSYGPALSVFCNNGDVDKAFMVEEHMLEHGVYPEEPELEALLKVSVEAGRSEKVYYLLHKLREGVRQVSPSTADLIEKWFNQAGVQGVGKRKWDERTYAKLFKTGGGGWHGQGLVGDDWYWLYAAIKFKCLIVTNDEMRDHLFQLLGNDFFPKWKERHQVHFSFSETGPVLHMPPPCSVVIQESEKGYWHVPIVSQQGSEEERTWLCIRRANSPLAKQESSSVDI

SEQ ID NO: 30 - protein, 535 aa, Nicotiana tabacum
MDKNKKKKKNLTPEVQFRLSLDNCSKTKDLSTAISLYESALSTIRFSNNHFNSFLYICSNAVSDPSTKNPAIEFGFRIFDHMVSSNVTPNEATVTAVARLAAATDDGDKAFELAKGVGNCGKLRTYGPALFCYCKMGEADKAYQVEDHMRSIGLQLEEAELVGLLKASVVKEREEKVYQYLHKLRMSVRSVSASAAEIIQSWFGGEMAAKLGLSDWDMGQVKEAILQNGGGWHGRGWLGKGKWIVQRSQIAPDGRCLTCREQLVCVDIDKAETERFAEAVASLAMEREVHSNFKEFQDWLEQHSEYDAVVDAANVGLYQQNFAEGGFSIAQLVTVVTRIAHKWHWCIHKSVFVHSENAYIESCLRVINEKVLYGTPFGSNDDWYWLYAAVKRKCLLVTNDEMRDHIFELLGSSFFAIWKERHQVKYTFVKGEPKLLMPPTYSVVIQESENGSWHVPLAGEVAEESSRSWLCMSRHDKQHTSVEAAEVSELVCSDQIEDSCHSDSFASQNGLNTCSGLAGKRKERSPSPSHSSLQS

SEQ ID NO: 31 - protein, 558 aa, Setaria italica
MRVAAAAAGALRPTAATFLLFSPLRQHRRPTLHLPFARRRRHSYSSTATVADPTPTLEDSGGARGEAEGKAARRRRARESPEGLLRHQLDMCSRNADLTTALRLYDAALSPDSPVPLSLHHYNCLLYLCSNAAASDPESSAAAAQRGFDIFARMEADGVQPNEATLTSVARLAAATRDPAMAFSVVRRMAAAGTPPRLRTYGPALFAYCDAKDADGAGQVEAHMDASGVVPEEPELAALLRVNADKGRADEVYRLLHRTRALVRQVCDTTAQVVEAWFRSDAASEAGVDKWDPSQVREGVVKGGGGWHGQGWLGKGQWSVGRSEMDKEGTCQRCGERLVCIDIDPSETDNFANSLTELAIKREVREDFLGFQRWLRRHGPFDAVIDAANVGLYNSKAFSFSQVNSVANAIQRVTKSKKLPLIILHRSRVNGGPAKAPFNQKILEGWRNAGALYATPPGSNDDWYWLYAAVSCRSLLVTNDEMRDHLFQLLGTGFFPRWKEKHQVRLTFSGRGPTLHLPPPYSIVIQESEDGTWHVPTTTGDDIEKPRQWICSTRKSFK

SEQ ID NO: 32 - protein, 731 aa, Setaria italica
MASLFATHSLPAHHRHILFPASSSPLIGSHRCFVPPLSCRAREVLDVMPRRDGGRPPRTEEGRTGSAGVRHGANGGTVRGDTTSREAGTPLQREGSRGVPRPWKKGDRVVGEERLDWESQEKNWRRGPIRTGEQEWQRDGKRWTRGGNGMWEKESGNSGNSRDVDRGSRNVTKKKMRVKGGEQGGKLRVLLDMCSKRGDVMRAISLFDSAIEDGIRLGQHHYNVLLYLCSSAALGFVQPAKSGNTASGITSIGPAQKLDSSPSGSLGGSEVDDASEGLVQDQEKEKAEMLPSGDLTVQTITIPVGDELREYARARGFEIFEKMCAEKERVQMSEAALTAKARMALSMGDGDMAFEVVKQMKDLGITPKLRSYGPALTAFCNSGNVEKAFEVEAHMLECGITPEEAELKMLLRVSVVGRRGDKVYYLLHKFRAAVRQVSLSTAQLFEAWFRSPTASKVGKRKWDAGVISKAIENNGGGWHGFGWLGRGKWTVTRSHINKNGACLACGEKLTIIDLDPKETEDFATFVSKLAIKRERNSNFEKFQKWLEKHGPFEAVVDAANVGLFSHKHLSLNKVNAVADAIRQRFASRKWPLIVLHNRHLTGERMKKPGNHKLVEKWKQANSIYATPNGSNDDWYWLYAAIRCKCLIITNDEMRDHTFQILEKDFFPKWKERHQVHFTYDESSVTFRMPPPYSVVIQESEKGHLHIPISEEGLLEKDRTWLCVTRRNSQER

SEQ ID NO: 33 - protein, 586 aa, Setaria italica
MGSISLWACGRLWPQTPPLALRALLLAPCSNRGRRRATHTAMATTTRRRPRRGSKGSNPDLSRTLTDCTRRGDAAAAIAAFDDAVSDPDAPARLAAHQYNQLLHLLATADRSSFPSAAAAARRVFAHMLQAGAPPSEATITSLARVTAAPDADNPASAADEAFELVATMREKHGLAPRLRSYSPVLAAFRRAGDASKAYAVEAHMAASGVSPEEPELAALLDISSTAGDADKVYEYMHKLRQTVDCVTEETAQVVEGWFSSDNAGVAGKAEWDAAQVKDAIVLNGGGCHRLGWLGTGPWTVQRVRAGADCQCAGCKCQLACVDIDMEETQRFADAVAALALERETKANFSQFQEWLEENKEYEAIVDGANIALYQQNFAEGGFSLTQLDAVITELRGRYHGKWPLVILHNKRIAKLMENSSNRHLIETWRANGALYTTPSGSNDDWYWLYAAIKLNCLLVTNDEMRDHIFELLGSSFFPKWKHRHRVKYTFNKGKAVLVMPPPYSSEIQESEVGSWHVPLEEKSGDERVRIWLCIGRTGTCKEPDEVPTTNGVVQEVPPNEESNGVQQSLQEDKAESITGKRKDRD

SEQ ID NO: 34 - protein, 553 aa, Sorghum bicolor
MRAAMAAAALRPTAATLRFLFTPPHQRRRLLVEHLPFARRRRHSSTATAPALEDSSPSNGEGKAARRRRARESPEGLLRHQLDMCSRNADLTTALRLYDDALSPDTPVPLSLHHYNCLLYLCSNAAATDTDTDSSTAAAQRGFDIFARMEADGVQPNEATLTSVARLAAATRDPAMAFSVVRRMAAAGTPPRLRSYGPALFAYCDAKDADGAKQVEAHMDASGVVPEEPELAALLRVNADKGKADEVYRLLHRTRALVRQVCDTTAQVVEAWFRSDAASQAGVDKWDPSKVKEGVVKGGGGWHGQGWLGKGAWSVGWTEMDKDGTCQRCGEKLVCIDIDPSETDNFANSLTELAIKREVKEDFLGFQNWLRRHGPFDAVIDAANVGLYNSKAFSFSQVNSVVNAIQRVTKSKKLPLIILHRNRVNGGPAKAPYNQKILESWRNAGALYATPPGSNDDWYWLYAAVSCRSLLVTNDEMRDHLFQLLGTSFFPRWKEKHQVRLTFSGRGPTLHLPPPYSIVIQESEDGSWHVPTTTGDDIEKPRQWMCTTRKSSK

SEQ ID NO: 35 - protein, 655 aa, Sorghum bicolor
MAYLSTTRFIPVYHRCIFFSASSSPPIVTRRCPVPTLSCHGRDVLDVMPNRDSRIPGTEESRAGPAGPPRGTNGPTVREDATAQEARTPLWREGSRGAPRTWRKGDRVVLQERVEWVSQERSWRRGLTRSLGSEGPRAGKRWTREGNGMRAKESGKVGNSRDEGTGRRNASKKMKRSKGGEYAGKLRVELDMCSKRGDVMGAIALYDSAVEEGVRLGQHHYNVLLYLCSSASLGDDLREYACARGFEIFEKMCSEKERVQMSEAALTAKARMALSMGDSDMAFEIVKQMKDLGLKPKLRSYGPALTAFCNGGNVEKAFEVEAHMLESGITPEEAELETLLRASVVGRRGDKVYYLMHKFRTTVRQVSPSTAELFEVWFRSPTASKVGKRKWDTGAIVKAIENNGGGWHGFGWLGRGKWTVTRSNINKNGVCLACGEKLAIIDLDPKETEDFATFVAKLAIKRERNSNFENFQKWLKKHGPFEAVVDAANVGLFGHRHLSLSKACILLRFTSRKWPLIVLHNKHLTGEHMKKPGNHKLVEKWKQANSIYATPTGSNDDWYWLYAAIRCNCLIVTNDEMRDHTFQILERNFFPKWKERHQVHFTIEDSCVTFQMPPPYSVVIQESDKGHWHIPVSEEALLEKDRTWLCVTRQNSQAQ

SEQ ID NO: 36 - protein, 526 aa, Sorghum bicolor
MASTATSRRRPRRGSKGPNADLCRTLTDCTRLAAHQYNQLLHLLASADRSSFPGPAAAAAARRVFAHMLQAGAPPSEATITSLARVIAAADDPGSSAADEAFELVATMKDKYGLSPRLRSYGPVLAAFRSAGEAAKAYAVEAHMTASGVSPEEPELAALLDVSSRAGDADKVYEYMHKLRQAVDCVSEETAGVVEAWFRSDKAAMAGKSEWNAAQVKDAIVANGGGCHRLGWLGTGPWTMQRVRVGADDQCAGCRYRLACIDIDMEETRKFADSVAGLALERETKTNFSRFQEWLEANKEYQAIVDGANIALYQQNFAEGGFSLTQQLDAVITELRDRYHGKWPLVILHNKRIAKLMENSSNRHLIETWRTNGALYTSPSGSNDDWYWLYAAIKLNCLLVTNDEMRDHIFELLGSSFFPKWKQRHRVKYTFNKGKAVLVMPPSYSSEIQESEMGSWHIPMEEKSGDERGRIWLCIGRGGSCKEHGEVPTTNGVVHEIPPTEASKVVQQRLAENKNETISGKRKDRD

SEQ ID NO: 37 - protein, 414 aa, Sorghum bicolor
MVESRSNSRLAAAIRSLAVAVAVAEPSSAASHPIPAYTVSGSSAGTDAAPYRMPHASSASVSPSPSPSRRRAIPAAASHAEAPLAAARSDKAATAGKSEWNAAQVKDAIVANGGGCHRLGWLGTGPWTVQRVRVGADDHCGGCRYRLACIDIDMEETRRFADSVAGLALERETKTNFSRFQEWLEANKEYQAIVDGANIALYQQNFAEGGFSLTQLDAVITELRDRYHGKWPLVILHDKRIAKLMENSSNRHLIETWRTNGALYTSPSGSNDDWYWLYAAIKLNCLLVTNDEMRDHIFELLGSSFFPKWKQRHRVKYTFNKGKAVLVMPPPYSSEVQESEMGAWHIPMEEKSGDERGRIWLCIGRGGSCKEHGEVPATNGVVHEIPPTEASNVVQQRLAENKDESITGKRKDRD

SEQ ID NO: 38 - protein, 692 aa, Hordeum vulgare
MRLAAAAGVLRPTAALLFHSRSRPHRLLPSPRRSSLPFARRRRHSYSSSTATALDDPPPPPSPDAPTPTGQGGDTKAARRRRARESPEGLLKHRLDMCSRDADLATALQLYEAAVDPATAVPLALHHYNCLLYLCSNSGDADAARRGFEIFAAMEAQGVEPNEATLTSLARLAAAVRDPAMAFSVVRRMAAAGIPPRLRSYGPALFAYCDARDANGAAEVEAHMDAGGVVPEETELTALLRVNADIGRADQVYRVLHRTRTLVRQVCQATAQVVEAWFRSDAAAEAGVDKWDARKVREGVVKGGGGWHGQGWLGKGQWDVGQSEMDKDGRCQRCGEKLVCIDIDPSETETFAKSLAELACNREVRDDFVRFQDWLHRHGPFDAVIDAANVGLYKSKAFSFSQVNSVVNGIQRVTKSKKLPLIVLHRSRVNCGPAKTPQNQKLIESWRNAGALYSTPPGSNDDWYWLYAAVSCRSLLVTNDEMRDHLFQLLGTSFFPRWKEKHQVRLTYSGRGPTFHLPPPYSIVIQESEAGSWHVPTTTGDDIESPRQWVCATRKTSERPPSPPPQARATSKTLEGPPSPPPQARATGKTSEGPPSPLPQARATRKTSEGPPSPPPQARTTSKTLERPASSPPQAHAGSKTLDRPPSPLPQARAARKTSGRLPSPPPQASATNKNAERPSPSPKARLSDLGW

SEQ ID NO: 39 - protein, 544 aa, Hordeum vulgare
MATAADGGTRRRRGRGGKGPNSDLSRTLTDCTRRGDAAAAMAAFDAAASGPDDLRLAAHQYNQLLHLLATAPFPGHPAAAARRVFAHMLGAGAAPSEATITSLARVVAADADAEGADEAFALVSTMRDKYGLAPRLRSYSPVLAAFRRAGDAGKAYAVEAHMAASAVSPEEPEVAALLEVSAKAGDADKVYEYMHKLRRAVGCVTEETAEVLEGWFRSEEAAAAGKAEWDACRVKEAIVAKGGGCHQLGWLRTGPWTVQRVRVAADGECGGCGCRLASVDIDMEDTHKFADSISGLALERETKANFSHFQEWLEEHKEYEAIVDGANIALYQQNFSEGGFSLVQLDAVVTELRDRYNGKWPLVVLHNKRIAKLMETPSNRHLIEIWRANGALYTSPSGSNDDWYWLYAAIGLNCLLVTNDEMRDHIFELLGSSSFFYKWKQRHRVKYTFNKGKAVLVLPPPYSSEIQESETGSWHVPIEEKSGDERARTWLCIGRTDLTKLPREPLVANGVAQDLSPSEASNGAGQRQSAEQAAPVTGKRKDRD

SEQ ID NO: 40 - protein, 552 aa, Oryza officinalis
MRLAAAAALRPSAALLLLLPPHRRTASLRRSSLPFARPRRHSTTTTTAETRPKPNESNAARRRRARDSPEGLLKAKLDICSRDNDLPTALTLYEAAISPDSLIPLSVGHYNCLLYLCANAAAASSPDAAHRGFDIFSRMEADGVQPNEATLTIVARLAAARRDPAMAFSIVRRMATAGSAPHLRSYGPALFAYCDAGDADGATEVEAHMDASGVVPEEPELAALLRVNSARGRPEQVYRILHRARVLLRQVADATAQLLESWFASHAASEAGLHDWDATKVKEGLRNGGGGWHGQGWLGKGQWTVGRSEMDKDGTCQRCGEKLVCIDIDPSETQSFAESVAQIAINRDANFIKFQEWLECHGPFDAVIDAANVGLYNRNSFSFYEVNRVVNGIQRITKSKKLPLIILHKNRVNGGPAKLPQNQKLLECWQRAGALYATPPGSDDDWYWLYAAVICRSLLVTNDEMRDHLFQLLGTSFFPRWKEKHQVRLTFSGRGWNFHLPPPYSIVIQESEEGSWHVPTTNGDDIEKPRQWICATRKISGKSSQAFARAVG

SEQ ID NO: 41 - protein, 590 aa, Manihot esculenta
MLRGSSLAPSFNRNSPLFSFFVQMPLLSVFRNSSLAFHRPLLHYHSYLFAKPVRDIQAYDLPMDRRAHLCCSALSTTPKVHESSALAMDKVSNKSKRKARQESPEGVLKLKLDMCSKHGDVVQALHLYDEARTNGVQLNQHHYSVLLYLCSSGSSVKLNGNVVDANASSLYYKRGFEIFQQMIIDKVAPSEATFTNAARLALALEDPEMAFDLVKQMKGFNILPKLRSYGPALFGFCSKGMADRAYEVDAHMAESGVMPEEPELSALLKLSADVKRADKVYDTLHRLRAIIRQVTDSTLGIIEDWFNSEDASKIGEENWDTSKVRKGILMGGGGWHGQGWLGSGQWRAVRTQIDEKGGCHSCGEKLVCIDIDPRETENFATSLSNLACQREVRTDFVRFQEWLQQHGPFDAVVDGANLGLVNQRTFSFYQLNSVVGKLREMSPSKRLPLIILHKRRVTGGPATNPKNKMLLEFWKKSGALYTTPAGSNDDWYWLYAAVTCNCLLVTNDEMRDHLFQLLGTSFFPRWKEKHQVRISVSRSGLTLQMPPPYSIVIQESENGSWHVPTIAGDDLETPRQWLCATRAKNKVIPF

SEQ ID NO: 42 - protein, 757 aa, Manihot esculenta
MASFPFNTLQPKHHLSTTLCKYPLSLNTLNFHCSFHFLTFYPFEHKPSFVRRASGNDINIKTKLSTANHENPTKTKNLRIRKSSSTVDERVGRKFVNNLVESVIEESIDERFTKNRNGRKDMGFRKRRDIDSGDLSTRFRDGNKKREALEIMDLQAINGKKLEKKTKKNADNQVKEKKIAKGSKENKPDSVEVKFRLDLDMCSKKGDVMGAIQLYDLALKEGIKMEQYHHAVLLYLCSSAAVDEDIKKYALRRGFEIYEKMCTDEVPVNEATLTAVARMAMSMGNGDMAFDMVKRMKPLGLNPRLRSYGPALSTFCNNGDVDKAFAVEKHMLEHGVHPEEPELEALLRVSVEAGKGDKVYYLLHKLRTTVRKIPPCTADIVVRWFKSKAASRVGKTKWNKRVIKEAIENGGGGWHGRGWLGKGKWNVSFTSIGPDAFCRCCGEKLATIDLDPAETQNFAESVASIAIKREKNSSFEKFQKWLNYYGPFEAVIDGANVGLLSEKIFIPSKINAIANGIRQQLPSKRWPLIVLHNRRVSGHNMNEPANKALIEKWKNADALYATPTGSNDDWYWLYAAIKFKCLLVTNDEMRDHTFQLLGNDFFPKWKERHQVHFNFSDVGPVFHMPPCFSVVIQESERGNWHIPIATDDDYEPERNWLCITRANSSVARHDSMTTRTEDSQSVDHSNDKQAMSPMQNSLKEKQEYNQCSLEVLSNSPQAVYKNLRNVLLASGFTERRTILQEIEAAEKLGGCVIDFQI

SEQ ID NO: 43 - protein, 560 aa, Manihot esculenta
MATAQGKKKKQNKNQTPESQFNYNLNFFSKSKDLRSAVSLYDSAVSSDTRLSQHHFNTLLYLCSISLSDPSTKELALQYGVRVFDHMVANGIKPNEASITAVARLAAAKGDGDYAFDLVKNMGVHNELPRLRTYDPVLLCFCDKLEADKAYEVEVHMESMGVSLEETELAALLKVSAETGNEERFYGYLQKLRKTVRCVREETAKIIEDWFQNFEHNGQELNVGLVREAVTRNGGGWHGIGWIGKGRWVVRRGNVDNDGKCFCCGEHLARIDIDDTETERFAASVAGLAMEREVKAYFNEFQDWLDKHPNYEAIVDGANVGLYQQNFAEGGFSVSQLDAVVKELYGQSGNWPLIVLHNKRVRALLENPSHSKLIQEWIEKEVLYTTPHGSNDDWYWLYAAVKLRCLLVTNDEMRDHIFELLGSNFFLRWKERHQVRYTFMKGNLKLHMPGPFSVVIQESEKGAWHVPIAGDGNEDSKQSWLCITRPSAWGEPGEDAVSMETCENGDSVWNGCKLLSPCKPKCISSCDSEPERQDSFQESDNKPATMTGKRKERSPSPSIS

SEQ ID NO: 44 - protein, 574 aa, Theobroma cacao
MLGVNPYVPSMSMFKKIPFSFIYRNCFHRSLLPFGMCYYHLFLKPVSISNVHVNYFAVDKTRNLSAVATAAKSTVNTSNSTNAMSNKARKKAHRESPESVLKYKLDMCSKHGKLVEALRLYEEGRSNGVTLKQHHYNVLLYLCAREASGDGVELKELGLKRGFEIFQKMVGDKVSPNETAFTSMARLAVAREDLDLAFELVKQMKSLGIPPKLRSYGPALFGFCEKGNAEKGYELDAHMAESGVTPEEPELSALLKVSADTKNADKVYDMLQRLRATVRQVSESTFQIIEDWFKSEDAAKVGVESWDVNKIKKGVVDGGGGWHGQGWLGSGRWRVMRTKMTENGVCRCCGEKLVSIDIDPKETENFATKLTELACNREVKADFIRFQEWLQQHGPFDAVVDGANVGLIKADTFNFNQLNNVVNQLRQMSPSKRSPLVILHQGRVTNGPARNPNNRNWLDSWKRAGALYATPAGSNDDWYWLYAAVSCKCLLVTNDEMRDHLFQLLGTSFFPRWKEKHQVRLSMTRLGLSLHMPPPYSIVIQESESGSWHVPTIADDDLLNPRQWLCVGRTRNKS

SEQ ID NO: 45 - protein, 877 aa, Theobroma cacao
MFSTSIVSLIILFSSPPKHKISQFFVDRRHVRHHFHAKFSTKDYETSTKTGNSKSKKEIGSGFNSLRSGNEGAERNSLENLFSSVLEGKAERKRYAKDKNARKRDKYFERGREMGSGDSSLRAKDENMGSKQKSSKNVNNLVAKEKVEGKTKDGDGLVKEKRLGKRSKKDQANSPEVHLRVQLDMCSKRGDVMGAIQLYDKALREKIKMGQYHYAVLLYLCSSAAVGVVQPAKSGSGSRPLNMLNVSNEASSMNSMGLGEPIDKDSENSSASELSNPILNNGKLVDSSRSQGNIDKLKVRFSESFCNLDNTFPDKNLNQFSNGSPKPYSRLSEGSSYQKKRDEDHLDIDDKSSSDREDYEIGVSEDVKKYALLKGFEIYEKMCLDNVPMNEATLTAVARMAMSMGNGDMAFDVVKKMNQLGINPRLRSYGPALSVFCNIGDVDKAFEVEKHMLEHGIHPEEPELEALLRVSVEAGRGDNVYYLLHKLRTSVRKVSPSTADKIVKWFESKEASRLGKRTMDQRFIKEAIENGGGGWHGQGWLGKGRWIISHTAVGADALCKCCGEKLALIDLDPVETEKFAESVASIATKREKHFSFQKFQKWLDYYGPFEAVVDAANVGLFSQRRFMPSKVNAVVNGIRQKLPSKKWPLIVLHNKRITGQKMDEPVNKALIEKWKNADALYATPTGSNDDWYWLYAAIKFKCLIVTNDEMRDHTFQLLGNDFFPKWKERHQVHFSFSNAGPVFYMPPPCSVVIQESEKGHWHIPIASELDYDTERTWLCIRRAKSHVVKEDSSTIPEDLQPLDRNKECTRPTIQTEVNTNSLSLKDGNHDKPQKHTEEIYKNIRDILSVPVPSDQCTVLSEIEAAEMLGNCVIDFQI

SEQ ID NO: 46 - protein, 566 aa, Theobroma cacao
MATPSHKGNPTNSTKRKKNHKNPEANFLYELNSCSKSKDLEAAISLYESAISNKTRLNQHHFNTLLYLCSTISTDPESKSLALTYGFRVFDHMITLNIHPNEASITAIARLAAAKGDGDYAFEMIKKLGDYRVLPRLRTYEPALFCFCQKLEAEKAYEVEADINKMGLSLEEPQIAALLKLSAETGRGEGVYEYLQKLRRGVRWVSEETGKVLEDWFSREGSEVGFEGATYEVSFVKEAVLRNGGGWHGLGWIGKGKWVVRKGKVEPNGRCCCCGERLGCVDIDDVETEKFAQSVAGLAMEREVKANFREFQEWLEQNADYEAIVDGANIGLYQQNFAEGGFSILQLDAVIKEMYGRSGNKWPLIILHNKRVRALLENPSYRKLVEEWMNNGFLYTTPHGSNDDWYWLYAAVKLRCLLVTNDEMRDHIFELLGSSFFLKWKERHQVRYTFPKGILKLQMPPSYSVVIQESEKGSWHVPIVCDGNEESARTWLCITRPGACEDLGKTASNIETCENGNGPCCKSEMSNTGDFEILPSDNRNQASQDFFQMSYAETPSITGKRKERSP

SEQ ID NO: 47 - protein, 588 aa, Cucumis sativus
MTTLASSLMSSFAKTSPFFLYFTKIPVFPCQNPLRASLRTYSCRSIVFSKNILKYSCNSYFSIHTVRYLCNVASAATSSVNASSTSSSNKVSHKLRKKALKEAPESVLKYNLDMCSKYGQVVKALELYDEARSNGIQLNQHHYNVLLYLCSSPSLLETSGANNLSSVVLSRGFEIFQQMMTDKVSPNEATFTSLARIAAARDDPEMAFSLVKQMKDYHIAPRLRSYGPALFGFCRKLMPKEAYEVDSHMLASAVEPEELELSALLKLSSDVKKADKVYELLHRLRRTVRQVSEPTAKVIEDWFNSESASEVGKKHWDVDKVRECIVRRGGGWHGEGWLGSGKWKLVRTGIDDNGVCHSCAQKLVCIDIDPKETEDFASSLTKLANQRVKADFNNFQGWLEKHGPFDAVIDGANVGLVNERQFNFIQLKRAVYQMRELSPSKKMPLIILHKRRITDGPARNPNNMKLIETWKNCGALYATPYSVNDDWYWLYAAVRFKCLLLTNDEMRDHLFQLLGNTFFPQWKEKHQVRLSVSRNGLKLHMPPSYSIVIQESENGSLHVPTTTGDDLETPREWLCATRPTNTSMSGFE

SEQ ID NO: 48 - protein, 740 aa, Cucumis sativus
MASSSLISAQQNHFFSSTTLCKFSSTITIFQSPCLLPFPTFSSPQHTIPLLRVGDGVVREFSATKNRKPSSKPSFSMTQKLNKNGSPHLGHGNETLVKNSVEDLVNLEVDERTRKRFEKGKNARDSSRSVNGMKMGDGISFLKTSTDSASLKVSRDGGKIKEKRKGNQVVEEKGKLLKGNNETPFRANLDMCSKTGDFIGAIKLYEWAQKEGINLEQYHYAVILYLCSSAALDFKKYALETGFEIYEKMCAENIPMNEATLTSVARMAMSMGDGDKAFDMVKQMKPLGLNPRLRSYGPALSTFCKNGKLEKAFSVEKHMLEHGVYPEEPELAALLRVSINASNAEKVYYLLHKLRTSVRQVLPSTADLIITWFKSKDAARVGKVKLDRKIIKKAIGNGGGGWHGLGWLGRGKWSVSSTNVGKDGLCKSCGEKLATIDLDPIETENFAESVAAIVTQREKNSSFQKFQKWLEYYGPFEAVIDAANVGLFSQRKFAPSKVNLIANGIRQKLPSKKWPLIILHNRRITGRKMEEPVNKTLIEKWKNADALYATPTGSNDDWYWLYAAIKFKCLIVTNDEMRDHTFQLLGNDFFPRWKERHQVHFSFSATGPVFHMPPPCSVVIQESENGHWHVPLASEHSYEEDRKWLCITRGNLQSQMARQEPPRKTEPQSLLLNKGNLGTRADVDIKKQPSTQVLTKNSSQDNYKSLKQILSAAVFSDKCNLLKEMEAAEKLGGCTIDFQI

SEQ ID NO: 49 - protein, 538 aa, Cucumis sativus
MDSTGSAKARKKSKNQSPEVKFQLDLTDCSRRKDLLSAITLCETAVSEKLKFNQQHFNTLLYLCSTAISDPSLKESAVSFGFRVYNLLQSIGVIPNEATVTAVARLAAAKRDGDSAFELVKTIGKYKVTPRLRTYDPALICFCENLEVDKAYEVEQHMNSAGVELEEPQISALLKLSSDTGKEDKVYEYLHKLRRVVKCVSESTAKIIEGWFCSEKASDIGESTMDIGLIREAILSNGGGWHGKGWIGKGNWVVKRTNVYSSGKCCCCAQQLVGVDISCAETENFAQSLAALAIEREAQPNFISFQEWLEVHNHCDAIVDGANVGLYQQNFADSGFNLSQVEAVVKELCKMSGGKWPLVLWHNKRTRASLDNSSHRKVVEEWIDKGVLYSTPIGSNDDWYWLYAAVKLKCLLVTNDEMRDHIFELLGNDLFLRWKEKHQIRYTFVKGQLRLEMPPPYSVVIQESETGSWHVPIAANDSELERTWLCVTRPGVSAASDVAVNGETCESIEAQGSCASMSVKLLDSSVARKRKERPSSTS

SEQ ID NO: 50 - protein, 578 aa, Vitis vinifera
MLTRAGGLSFFFAKTPILCHVGHTRLRSLLYGCSHHHFKPTTYSPYIKVRIFMNKSAHFSNLALSATNKYIPESSAVAETMSNKARKKARRESPEGVLRFKLDMCSKRGDVVEALRLYDEARSRGVPLSQHHYNVLLYLCSCSGSNGDENVVNLALKRGFEIFKQMGVDGIEPNEATFTSAARLACAMEDPEMAFNLVKQMKSCGIPPKLRSYGPPLFGFCKKGDADRAYEVDAHMMESGVVAEEPELCALLGLSVESRRVDRVYEMVHRLRASVRQVSESTAEVVERWFNSEDAAGVGEENWDVGKVREGVVKGGGGWHGQGWLGKGKWKVVRTEMDEAGVCQSCGEKLVCIDIDPRETENFASSLTKLACQREVKADFVQFQEWLQRHGPFDAVVDGANVSLINQKSFSFFELNSVVNRLRQISPSKRLPLVILHRSRVTGGPAQNPNNKKLIESWKKSGALYATPAGSNDDWYWLYAAVNCNCLLVTNDEMRDHLFQLLGTSFFPRWKEKHQVRLTITRRGPVLHMPPPYSIVIQESEQGSWHVPTVTGDDLETPRQWLCATRTRKNHRHPQHLE

SEQ ID NO: 51 - protein, 578 aa, Vitis vinifera
MLTRARCLSFFFAKTPILCHVGHTRLRPLLHGCSHHHFKPTTYSPYIKDRIFMNKSAHFSNLALSATNKYIPESSAAAKTMSNKARKKARRESPEGVLRFKLDMCSKRGDVVEALRLYDEARSLGVPLSQHNYNVLLYLCSCSGSNGDENVVNLALKRGFEIFKQMGVDGIEPNEATFTSAARLACAMEDPEMAFNLVKQMKSCGIPPKLRSYGPPLFGFCKKGDANRAYEVDAHMVESGVVAEEPELCALLGLSVESRWVDQVYEMMHRLRASVRQVSESTAEVVERWFNSEDAAGVGEENWDVGKVREGVVKGGGGWHGQGWLGKGKWKVGRTEMDEAGVCQSCGEKLVGIDIDPRETENFASSLTKLACQREVKADFVQFQEWLQWHGPFDAVVDGANVSLINQKSFSFFELNSVVNCLRQISPSKQLPLVILHRSRVTGGPAQNPNNEKLIQSWKKSGALYATPAGSNDDWYWLYAAVNGNCLLVTNDEMRDHLFQLLGTSFFPRWKEKHQVRLTMTRRGPVLHMPPPYSIVIQESEQGSWHVPTVIGDDLETPRQWLCATRTRKNHRHPQHLE

SEQ ID NO: 52 - protein, 756 aa, Vitis vinifera
MALFTINNTLHQKHFFCNCKCPSPFNAFKFHHSSHFLTFSSPKHTPPPRKSALLIVRPHVGHLYAKLCTADHEPSTADMGGRTGKETGSGFSSYGSKGERVGRKSVKTHVGWAVEEKNEKRFTRERYSKKRLDSRRNGGTSSKFPSLKSESKNLVNKSLKANEKEEEKSKKGDADKVREEMEKGSKKNKVDSQEGLLRVGLEMCSKNGDVMGALELYDSALREGIELGQYHYTVLLYLCSSAALDFKKYALRRGFEIYEKMCLEKVPMNEATLTSVARMAMSMGNGDMAFDMVKQMKPLGINPRLRSYGPALSAFCNNGDIEKAFGVEEHMLEHGVYPEEPELEALLRVGIEAGKSDKVYYVLHKLRTSVRQVSHSTANLIEKWFKSNAAAAAGKGNWDQRLISEAIVNGGGGWHGQGWLGKGKWNVSHTNVGADGLCLCCGEKLATIDLDPTETEKFAESVASIAIKREKNSSFQKFQKWLDYYGPYEAVVDAANVGLFSQRRFIPSKVNAIVNGIRQMLPSKKWPLIILHNKRITGKKMDEPANRALIEKWKNADALYTTPTGSNDDWYWLYAAIKFKCLIVTNDEMRDHIFQLLGNDFFPKWKERHQVHFSFSDSGPVFHMPPPCSVIIQESENGHWHIPVASEHDSEGERTWLCVTRANSQMAKQSPSPRNKESQYPCYDKRRVRSDTQTEIHKELSSSNHRNQEKSKAPPQEIYRNLRNILSASIFPTHSTVLSEIEAAEKLGNCIIDFQI

SEQ ID NO: 53 - protein, 551 aa, Vitis vinifera
MKKKKNNKTTVEGKFRFDLDTCSKRRDLSGAVALFESAVSQNFRLIHYHFNALLYLCTISIDEPSSKALALDYGFRIFDHMVNSGVTPNEATITAVARLAAAKSDGDLAFEVVRTMGKYELSPRLRTYGPALYWFCANLEGEKAWAVEEHMVSMGVHPEEPELAALLKVSAEMGRGDKVYAYLHKLRTAVRSVSESTAEIIEGWFCGEAASEVGGVDCCLGAIEEVALKNGGGWHGQGWIGKGKWLVCRAKVDSSGQCGSCREQLATVDIDRAETETFLESVAAMAMEREVRSNFREFQDWLDKHADYEAIVDGANIGLYQQNFANGEFSIPQLDAVVKELYDRSQKKRPLVILHNKRFRKLSENASNRKLLQEWLTQGVLYTTPNGSNDDWYWLYAAVKLKCLLVTNDEMRDHIFELLGSSFFLKWKERHQVRYTFVKGNVKLLMPPSYSLFIQESVKGTWHVPVASESSDESLRTWHCITRPSSHELNGKASVNLETCEIDRQEQCDFKLSSCKSEGLRNGSCENKTTTMTGKRKDRSPSPSPSPMQRH

SEQ ID NO: 54 - protein, 560 aa, Glycine max
MMARLAPPFSIFRQSHYWRPLLSSHNAKRTLTAATNFSITSLARTPKSRDEGTTTIVKLSSKARRKAFYESPEGVLLRKLNECSKDGNVAQALCHYDEARKLGVLLNLDHYNKLLYLCSIESAAGFPNLGLKRGFEVFQQMLNDRVQPNEATFTNAARLAAANEDPDMAFELLKQMKNVAIAPKLRSYEPALFGFCKRGDAEKAYLVDADMVESGIVAEEPELSALLEVSVNAKKEDKVYDILHRLRSTLRQVSESTLGIVEDWFNSEYAAKIGKEKWDVKKVREGIAQGGGGWHGQGWLGSGRWKVANTQVNEDGVCPLCGEKLVSIDIDPKETENFAASLSKLACQKEAKANFVHFQTWLEQHGPFDAVVDGANVGLANGHNFSFSQLNTVVEQLRQISPSKRLPLIILHISRVRGGPAQNPKNMRLIENWKKNGALYATPQGSNDDWYWLYAAVSCKCLLLTNDEMRDHLFQLLGSNFFPRWKEKHQVRTSASTCGHSIIMPPRYSIVIQESANGSWHVPTVTTDDHEIPRKWLCATRSRKDSLHNLWTSSSKSDCT

SEQ ID NO: 55 - protein, 553 aa, Glycine max
MAGIFRQSHYWRPLLSSHNAKRTLTAATNFSITSLARTPKSRDEGTTTIVKLSSKARRKAFYESPEGVLLRKLNECSKDGNVAQALCHYDEARKLGVLLNLDHYNKLLYLCSIESAAGFPNLGLKRGFEVFQQMLNDRVQPNEATFTNAARLAAANEDPDMAFELLKQMKNVAIAPKLRSYEPALFGFCKRGDAEKAYLVDADMVESGIVAEEPELSALLEVSVNAKKEDKVYDILHRLRSTLRQVSESTLGIVEDWFNSEYAAKIGKEKWDVKKVREGIAQGGGGWHGQGWLGSGRWKVANTQVNEDGVCPLCGEKLVSIDIDPKETENFAASLSKLACQKEAKANFVHFQTWLEQHGPFDAVVDGANVGLANGHNFSFSQLNTVVEQLRQISPSKRLPLIILHISRVRGGPAQNPKNMRLIENWKKNGALYATPQGSNDDWYWLYAAVSCKCLLLTNDEMRDHLFQLLGSNFFPRWKEKHQVRTSASTCGHSIIMPPRYSIVIQESANGSWHVPTVTTDDHEIPRKWLCATRSRKDSLHNLWTSSSKSDCT

SEQ ID NO: 56 - protein, 724 aa, Glycine max
MAPFTFTLDFNTLQLQLRHSLFFSKPKLCRVYHPRPSTNIITFSFIQRTQTATKYSSSLEIVTKRAPPASFEPKAGISSTSSSSEVSERVKKKKKKKKNKDKDCPEVKLKNALDMCSKRGDVMGALSLYDSAISEGVKLGQHHYTVLLYLCSSAAVGVVRPAKSGSGARTLNSHVYSNEVPNEGTHFDLDGKAELNSDLNSTEKDEILLVSEDVKRYALQRGFEVYQNMCLDKVQMNEAALTAVARMAMSMGDGDRAFEMVRQMKDLGISPRLRSYGPALFTFCNNGEIDKAFAVEKHMLQHGVYPEEPELEALLRVSVGAGNSDKVYYVLHKLRSIVRKVSPTTSSLIVDWFKSKQASRVGKRKWDERLIREAIENNGGGWHGQGWLGKGKWEAVHTTIGKDGMCKCCQVQLTTIDLDPVETENFAKSVASLAVMREKGSNFQKFQKWLDYSGPFEAVVDAANVGLFGQGRFMPHKINAVANEIRQRLPSKKFPLIILHNKRIKGDKMDEPINRALIDKWNNADALYATPTGSNDDWYWLYAAIKFRCLLVTNDEMRDHLFQLLGNDFFPKWKERHQVRFSFSDTGSPVFHMPPPCSVVIQESEEGHWHIPIDAELNDESERRWLCITRAKLDVVSKDSSTSKDSKPLQKGECARSATRNASAKESQHQNLVNHKEKKETPQELYKNVRDIFLESVSSDKNNSILSDIEAAELIGGCTIDFQI

SEQ ID NO: 57 - protein, 529 aa, Glycine max
MEEHPKKKKKGCRNPETKFQFELNSCSKAKDLRGAISLYDDAVSNNTRLNQHHFNALLYLCSNSVADPSLKPTALDYGFRAFRHMSALAVLPNEATVTAVARLAAAKGDADYAFELVKSMGKNYNNALPRLRTYDPALFCFCEMLDADKAYEVEEHMNGVGVSLEEAELAALLKVSARCGRVDKVYEYLHRLRSSVRCVSESTAVVIEEWFRGSKASEVGEAEFDAGRVKEGVLRNGGGWHGQGWVGKGDWVVSRTSVVADGHCCCCGQQLVCVDIDDVETEKFAGSVAALAFEREVKANFSEFQAWLEKHASYEAIVDGANIGLYQQNFADGGFNISQLDDVVKELYNRSGKKWPLVVLHNKRLRGLMENPSSRRLVEEWMKNGVLYTTPNGSNDDWYWLFAAVKLRCLLVTNDEMRDHIFELIGSNFFNQWKERHQVHYTFVKGNLKLQMPPSYSLVIQESEKGYWHVPLVSGTSCESTRCWLCITRPSGHDAVATVSNGVSSLDSQVDENSATSIAGKRKERSPPS

SEQ ID NO: 58 - protein, 530 aa, Glycine max
MEHSKKKKKKKGSQNPEAKFQFELNTCSKAKDLRGAISLYDDAVSNNTRLNQHHFNALLYLCSNSVADPSLKPTALDYGFRAFCHMSALAVLPNEATVTAVARLAAAKGDADYAFDLVKSMGKNYNNALPRLRTYDPALFCFCEMLDADKAYEVEEHMSGVGVSLEEAEVAALLKVSARCGRADKVYEYLHKLRSSVRCVSESSAVVIEEWFRGSKSSEVGEVEFEAGQVKEGVLRNGGGWHGQGWVGKGDWVVSRTSVGADGHCCCCGEQLVCVDIDDAEREKFAGSVAALAFEREVKANFSEFQAWLEKHASYEAIVDGANIGLYQQNFADGGFSISQLDDVVKELYNRSGKKWPLVVLHNKRLRGLMENPSSRRLVEEWMNNGALYTTPNGSNDDWYWLFAAVKLRCLLVTNDEMRDHIFELIGSNFFNQWKERHQVHYTFVKGNLKLQMPPSYSLVIQESEKGYWHVPLAPGTSCESTRCWLCITRPCGHDVVATVSNGVSSLDSQVDENNATSVTGKRKERSPPS

SEQ ID NO: 59 - protein, 565 aa, Prunus persica
MVGALARTPPLFSSFIKIPLPLISRNSRCIFRTIIHFPKPKLTPTSMDNFSMDKRLHLCTLALSNDSPSRSASAPLVSNKSKKKARRESPEGVLRHKLDMCSRQGHLVEALRIYDEARSRGLPLSLHHYNVLLYLCSSNGGADDDGVGLKRGFEIFRQMVDDKVVPNEATFTSAARLAAAAEDPEMAFHLVKQMKGLGIPPKLRSYGPALFGFCKKGEADRAYEVDAHMVESKVIAEEPEISALLKVSSDSSKGDKVYEMLHRLRISVRQVSESTSGVVEEWFMSEEAANVGMESWDVEKVREGVVRGGGGWHGQGWLGSGNWRVVRTQMDEAGTCSCCGQKLVSIDIDPKETENFATSLNKLASQREVKADFFQFKEWLQKHGPFDAVIDGANVGLINLHNFSFSQLNTLVNRLRQMSPSKRLPLVILHTNRVTGGPAQNPNNKKLLESWKKAGALYATPAGSNDDWYWLYAAVNSKCLLVTNDEMRDHLFQLLGTNFFPRWKEKHQVRMSVSRQGLALHMPPPYSIVIQESEDGRWHVPTTIGDDIETPRQWLCATRATTNTK

SEQ ID NO: 60 - protein, 850 aa, Prunus persica
MASSTSNSLQQKHHLLSINLCKYPSALNSFKFHCPSHFLTFSPPKQTLELKHTLQLYPLPVVRENISHIVAKLSTTYREPYIKTKSPGTGTEFSSLKSTEERVGKKSVKNHVGSVEEKKAEDRFSKDRNTRKNPGFRKRRDDNEHSSRRLKDENKVNFSGKRNDKQAGEEKRGKGSKKYDVDAPEVKMRIGLDMCSKRGDVMGAIKFYDLAQREEIKLEQYHYTVLLYLCSSAAVGVVRPAKSGSGSRTLDTLDSSASEETRVNSMELGSGNWDGRGLNTSTLDTEQLVDTNGSNGEKMGFDDLDGTSDEKENLAWFSNGFVKRNSRLLDGLNYPTKGGDDSSNLKDGSIKQEDNRIRVSEEVKKYALQRGFEIYEKMCLDNVPMNEAALTSVARMAMSMGDGDMAFDMVKQMKSLGINPRLRSYGPALSAFCHSGDIDKAFAVEKHMLDHGVYPEEPELEALLRVSVGVGKGDKVYYMLHKLRTSVRRVSPSTADLIMNWFHSKEAARVGKIKWDPRLIREAIENGGGGWHGQGWLGKGKWSVLRTTIGADGLCKCCGEKLATIDLDPVETENFAESVASIAIKREKNSSFQKFQKWLDYYGPFEAVVDGANVGLFSQKKFIPSKVNAVVNGIRQKLPSKRWPLIVLHNRRISGGKMDERVNRALIEKWQNADALYATPTGSNDDWYWLYAAIKFKCLLVTNDEMRDHIFQLLGNDFFPRWKERHQVHFSFSDAGPVFHMPPPCSVVIQESEEGHWHIPVVSEHDCEAERTWLCIMRSKSRLERNDSATRPEGNSECYQFMKYTKHQPREFFENIKDILSGSMISDCHSIVPDIATAEKIGGCVIDFQI

SEQ ID NO: 61 - protein, 552 aa, Prunus persica
MGTPKKTKKKQTPETQFHSSLTLCSKHKDLPSAISLYESAVSQKTHFNHHHFNTLLYLCSNSVSDPSLKQLALDNGFRVFNQMLSIGTLPNEATITAVARLAAAKGDGDYAFGLVKGMDKYNVLPRLRTCDPALFCFCEKLEAEKAYEVEEHMGMVGVSLEEPEIAALLKVSAETGNGERVYGYLHKLRNVVRCVGESTAKIIEDWFLGGVACELGEANWDSGGVKEAVLRNGGGWHGQGWIGKGVWDVRRANADMSSSQCCSCGERLVCVDIDCGETQRFAESVAALAMEREVKSNFSEFQDWLDKHAEYEAIVDGANIGLYQQNFADGGFSLSQLDAVVKELYNKSGEKWPLVVMHNRRFRGLVENPSHRKLIEEWMDKGILYATPSGSNDDWYWLYAAVKLKCLLVTNDEMRDHIFELLGSSFFLKWKDRHQVRYTFVKGNLQLQMPPPYSSVIQESEIGSWHVPVADDSCQEPARTWLCITRPSVSKASGEVSHNLETSRTGGVCRNLESLNSCTTEFVASHNEKTTVVTGKRKERSPSPSQLNLSSA

SEQ ID NO: 62 - protein, 564 aa, Malus domestica
  misc_feature (30)..(30): Xaa can be any naturally occurring amino acid
  misc_feature (306)..(306): Xaa can be any naturally occurring amino acid
  misc_feature (382)..(382): Xaa can be any naturally occurring amino acid
  misc_feature (506)..(506): Xaa can be any naturally occurring amino acid
  misc_feature (525)..(525): Xaa can be any naturally occurring amino acid
  misc_feature (553)..(553): Xaa can be any naturally occurring amino acid
  misc_feature (559)..(559): Xaa can be any naturally occurring amino acid
MLHGGALPRTSPLFSFFIKIPLPLIFRTSXRFFRPILRSPKPKPTLNSTDSFSMDKRLNLCTLALSDNSPSPSSPAVSNKAMKKARRESPEGVLRHKLDMCSRHGQLVQALSLYDEARSNGVPLSLHHYNVLLYLCSSNGGGDDGDMGLKRGFEIFRQMVEDKVVPNEATFTSAARLAIAGEDPEMAFHLVKQMKGLGFPPKLRSYGPALFEFCKKGEADRAYEVDAHMVESGVVAEEPEITALIKVSSDSSRGDKVYEMLHRLRTTVRQVSESTYGVVEEWFKSEEAAKVGVETWDVNKVREGVXRGGGGWHGQGWLGSGNWRVERTQMDEVGTCSCCGEKLVSIDIDPKETENFATSLSKLASQREVRGDFIRFQEWLQXHGPFDAVVDGANVGLVNQHNFSFFQLDTLVNRLRQMSPSKRLPLVILHQNRVTGGPAQNPNNKRLLESWKKSGALYSTPVGSNDDWYWLYAAVNCKCLLVTNDEMRDHLFQLLGTSFFPRWKEXHQVRLSVSRRGLNLHMPPXYSIVIQEAEDGEWHVPTTTGDDIETPRXWLCATXARNTK

SEQ ID NO: 63 - protein, 821 aa, Malus domestica
  misc_feature (25)..(25): Xaa can be any naturally occurring amino acid
  misc_feature (99)..(99): Xaa can be any naturally occurring amino acid
  misc_feature (171)..(171): Xaa can be any naturally occurring amino acid
  misc_feature (287)..(287): Xaa can be any naturally occurring amino acid
  misc_feature (499)..(499): Xaa can be any naturally occurring amino acid
  misc_feature (512)..(512): Xaa can be any naturally occurring amino acid
  misc_feature (526)..(526): Xaa can be any naturally occurring amino acid
  misc_feature (565)..(565): Xaa can be any naturally occurring amino acid
  misc_feature (584)..(584): Xaa can be any naturally occurring amino acid
  misc_feature (648)..(648): Xaa can be any naturally occurring amino acid
  misc_feature (669)..(669): Xaa can be any naturally occurring amino acid
  misc_feature (686)..(686): Xaa can be any naturally occurring amino acid
MELFQRPHMASFTSNALQQKHHHHXLLSATLCKCPSAFHVFKFRFPSHIFTFSPPKQTLNLYPLPLARQNISHIVAKLSSTTYHEPYTKSQNSGTGSGXEFSSLKSTEQRVSRKPVKNHVGSGVEKNGEDTRKNLVFRKRREGNGPNGPNGPNGHSSRRFRDENAVKSSKXRGSLGVKEGRNKRGGGNQVGGEERRGRGLKKYDADLPEVKMRVGLDMCSKRGDVMGAIRFYDLAQTEEIKLEQYHYTVLLYLCSSAAVGVVRPAKSGSGSRTLDTLDSHSEETRVXSMDTSNLDNEDLDDTCGSNSFDDDSDGTSDENENLAWFSNGFVKRNSRLLDGLNYPTKGGDDSSNVKEGSSKQEDNGIRVSEDVKKYALKRGFEIYEKMCSDNVPVNEAALTSVARMAMSMGDGDMAFDMVRQMKSMGINPRLRSYGPALSAFCHSGDIDKAFAVEKHMLEHGVYPEEPELEALLRVSVGVGKGDKVYYMLHKLRTSVRRVXPSTADLIVKWFLXKEASRVGRTKWDRXSIRDAIENGGGGWHGQGWLGKGKWSVLRTTIGDDGLCKXCGEKLATIDLDPVETENFXESVASIAIKREKNSSFQKFQKWLDYYGPFEAVVDGANVGLFSQKKFVPSKVNAVVNGIRQKLPXKKWPLIVLHNRRITGGRMDEXVNRALIEKWQNADALYXTPTGSNDDWYWLYAAIKFKCLLVTNDEMRDHIFQLLGNDFFPRWKERHQVHFTFSDAGPVFHMPPPCSVVIQESEEGHWHIPVVSEHERESERTWLCIMRAKSRTATKDSAAIPEGDFQGLAICLFLIAQSLLCL

SEQ ID NO: 64 - protein, 553 aa, Malus domestica
  misc_feature (241)..(241): Xaa can be any naturally occurring amino acid
  misc_feature (333)..(333): Xaa can be any naturally occurring amino acid
  misc_feature (346)..(346): Xaa can be any naturally occurring amino acid
MPMGTPKKIKKKQTPEAQFHSSLTLCSKHKDLPTAISLYESAVSQNTRLNHHHFNTLLYLCSNSVADPSIKQLALENGFRMFDHMLSIGVLPNEATITAMARLAAAKGDGDYAFGLVKGMEKYKIFPRLRSYDPALFCFCEKLEAEKAYEVEEHMGMVGVSLEEPEIAALLKVSAETGNGERVYGYLHKLRNAGRCVSESTAKNIEDWFCGGAACEVGEVNWDSVRVKESVLRNGGGWHGXGWIGKGVWDVKRTNVDLSSSQCSSCGERLVCVDLDCAETERFVKSVAALAMEREVKSNFSEFQDWLDKHAEYEAIVDGANIGLYQQNFADGXFSLTQLDAVVKEXYNRSGGKWPLVVMHNRRFRGLVENPSHRKLFEEWMGKGILYATPSGSNDDWYWLYAAVKLKCLLVTNDEMRDHIFELLGSSFFLKWKERHQVRYTFAKGNLKLQMPPAYSSVIQESDNGSWHVPVADESCQEPGRTWLCITRQSVSKACGEVSQKLASSRNGGICDNHELRSCTSDSVASHNDKTTVVTGKRKERTPSPSHLNISPA

SEQ ID NO: 65 - protein, 564 aa, Fragaria vesca
MLHGGAAVTKTPPLFSFFIKIPLPFLSRTSRRFFRPIPHYPKPQPSPISTHTFSMNQRLNNSTLALSRDSPPSPAAPSVSNKARKKARRDLPEAVLKHKLDMCSRHGQVVEALRIYDEARTNGVPLSLHHYNVLLYLCSCDGEDADVGLGRGFEIFRQMVEDKVVPNEATFTNAARLAAASADPEMAFGLVKQMKVFGIEPKLRSYGPALFGFCKKGEAERAYEVDAHMVECGVVAEEAEISALLKISSEMGKGEKVYEMMQRLRSGVRQVGESTAEVVEEWFKSKEAGRVGVERWDVKKVREGVVRGGGGWHGQGWLGSGEWKVVRTQMDEAGTCAGCGQKLVCIDIDPKETEDFALSVTKLANQREVRNDFAQFQEWLQRHGPFDAIVDGANVGLSNQHYFSFIQLNTVVNRLQKLSPANRLPLVILHKSRTIGGPAQTPKNKALLESWKKSRALYATPPGSNDDWYWLYAAVSCKSLLVTNDEMRDHLFQLLGTNFFPRWKEKHQVRVSVSKLGLNLHMPPPYSIVIQESEDGSWHVPTTTGDDIETPRQWLCATRARNTK

SEQ ID NO: 66 - protein, 801 aa, Fragaria vesca
MLLANPYRYRPSKILQGPHMASFTSNSLQQKHHHHHYLLHSITTICKYPSPLNVFEYHCPSHFFTFSPPKQTLQLKHTLKLYPLPLARGNINHIVAKFSTTTTTTTYHEPNSKTLKNSATEKPVKNNGSSVVEKKSEKTRFIKQKSTRKEGVWFKGESKERKKRGSSDGDQVGEEKKGRFSKKNKVKVNVDLPEVKMRVGLDMCSKRGDVMGAIKYYDLAQTEEIQLGQYHYTVLLYLCSSAAVGVVRPAKSGSGGTRTLDTVDSSGEKTVELSKVRDSESGNWDDTSGSDESAEKMEVSPGNRFDDDVDGASNEKRNLAWFSNGFVKRNSRLLDGLNNPTKVGDDGTGLEDGNVKQESNEIRVSEDVKKYALQRGFEIYEKMRLDGVAMNEAALTSVARMAMSMGDGDMAFDMVKQMKSMGINPRLRSYGPALSAFCSSGNIDKAFAVEKHMLEHGVYPEEPELEALLRVSVGARKGDKVYYMLHKLRTSVRRVSPSTADLIVKWFESKEASRVGKTKWDERLIRQGIENGGGGWHGQGWLGKGKWSVLRTTIGSDGLCKCCGGKLATIDLDPVETENFAESVASIAIKREKNSSFQKFQKWLDYYGPFEAVVDGANVGLLSQKIFIPSKVNAVVNGIRQKLPSKRWPLIVLHNRRITGGRMDERVNKALIEKWQNADALYATPTGSNDDWYWLYAAIKFKCLLVTNDEMRDHTFQLLGNDFFPRWKERHQVHFNFSEGGPVFHMPPPCSVVIQESEEGHWHIPVVSEHGYEAERMWLCIMRAKSREARKDSATRPKGNL

SEQ ID NO: 67 - protein, 551 aa, Fragaria vesca
MNKTNLHIGFEIWTLMGTPKRKKKQTPEAQFHSSLTFCSKNKDLSTAISLYESAVSRNTRLNQHHFNTLLYLCSNSVTDPALKQSALEYGFRMFDHMSLTEVVPNEATITAVARLAAAKGDGDYAFELVKGMEKYNVLPRLRTCDPALFCFCEKLEADKAYEMEEHMNKVGVSVEEPEISALLKVSAEMGRGERVYDYLHKLRNTVRCVSESTAKIIEDWYRDGRASEVGEVSWDSGRVKEVVLRNGGGWHGQGWIGKGDWDVQRANVDSESKCCSCGEHLVCVDIDCAETDRFAQSVAALAMEREVRLNFSEFQDWLDKHADYEAIVDGANIGLYQQNFADGGFSLPQLDAVVKELYNRSGEKWPLVVLHNRRFKSLVENPSHRKVVEEWMDKGILYTTPSGSNDDWYWLYAAVKLKCLLVTNDEMRDHIFELLGSSFFLKWKERHQVRYTFIKGNLKLQTPPPYSSVIQESESGSWHVPLADDSCEEPARTWLCITRPSVTKASSGVLISQSALPNSCTSQFVTSHNDKTTTKTGKRKERSPSPSHLMI

SEQ ID NO: 68 - protein, 593 aa, Citrus clementina
MLRGNFLTPSLIRTSPFLTFLSKISLPLMHQSNCHTYRPLLCWHMHSFTKPITDIKQNRFSADLTTGLCTLAFSKKSTVNESSAPNTGTMSNKSKKKARRESPEGVLRHKLDMCSKRGDVFEALRLYDDARSNGITLSQHHYNVLLYVCSCKCGSESSENGDRETDLNLGLKRGFEIFQQMITDKVDPNEATFTSVARLAVAKEDPEMAFDLVKQMKSFGIPPKLRSYGPALFGFCKLGNTDKAYEVDAHMGESGVVPEEPELSALLKLSVDAKKVDKVYEILHRLRTLVRQVSESTFKIIEDWFDSVDAAEIGVLNWDVSKVREGIVRGGGGWHGQGWLGSGKWRVERTQIDENGVCCSCNERLVCIDIDPRETENFASSLSNLACQREVRSDFNKFQEWLGRHGPFDAVIDGANVGLVNQHNFSFYQLNTVVNRLRQMSPSKRMPLVILHKGRVSGGPAQIPKNKKLLDIWRDGGALYTTPPGSNDDWYWLYAAVNCKSLLVTNDEMRDHLFQLLGTSFFPRWKEKHQIRLSVSRDGLNLLMPPPYSIVIQESENGSWHVPVITGDDLEAPRQWLCATRARVKSLHSLFSN

SEQ ID NO: 69 - protein, 874 aa, Citrus clementina
MASSLTVNTLQQQNQLFSLTLCKSSPPTLTVFNFQFLSRFLSSSPPKRTPLLVFKAHVRNTQAKLSTTETEHETSTVTLRTRKGTASGASSLGTRDKRVDSAGEEKDGKRLTKDNNSRKNFAFLKSREMSSGNSSLRSKDKKIGIKSSKTVNREVDNQKMEQRTNDSGQYKVRGITDEKGSKKSKKDRSEQFQLRVELDMCSKRGDVMGAIRLYDKAQREGIKLGQYHYNVLLYLCSSAAVGVVKPAKSGSGMRTLDTFEVSTMNSTELGDSRDMDNNGQLDYGSSPMIDKLESNSSYRFDDLDSTFNEKENLGQFSNGHMKLNSQLLDGRSNLERGPDDQSRKKDWSIDNQDADEIRLSEDAKKYAFQRGFEIYEKMCLDEVPMNEASLTAVGRMAMSMSDGDMAFDMVKRMKSLGINPRLRSYGPALSVFCNNGDVDKACSVEEHMLEHGVYPEEPELEALLRVSVEAGKGDRVYYLLHKLRTSVRKVSPSTADVIAKWFNSKEAARLGKKKWNESLIRDKMENKGGGWHGLGWLGKGKWIVSHTTVGGDALCKCCGEKLAIIDLDPIETEKFAESVASIAIKRERNSSFQKFQKWLDYYGPFEAVVDAANVGLYSQRNFKPARVNAVVNGIRQKFPSKKWPLIVLHNRRITGHKMDQPVNRALIEKWKNADALYATPTGSNDDWYWLYAAIKFKCLLVTNDEMRDHTFQLLGNDFFPRWKERHQVRFSFSDAGPEFYMPPPCSVVIQESEKGNWHIPIASKQDYDDEERRWLCVTRANSHMNRQNSYSSPKDLQPLDHNKGQASSSTRADAKTKSHSSNDSPSVNTKRPARKMYKNLKNILSASVLSNHQSVLSKIEAAEELGDCVIDFEI

SEQ ID NO: 70 - protein, 501 aa, Citrus clementina
MSNTTSTNPSKPNKKRKTNPNPETNFLINLQSCTKSKDLTTAISLYESAHSQNLRLSLHHFNALLYLCSDSATDPSSKDSALRHGFRVFDQMLSNNVIPNEASVTSVARLAASKNDGDYAFVLIKRMNNEFNVVPRLRTYDPALFCFCENLEAEKAYEVEEHMGLMGLSLEQQEIAALLKVSAETGRVEKVYQYLQKLRSTVRCVNEETGKIIEDWFSGQKVNGVSCDLGLVKNAVLKNGGGWHGLGWIGQGKWVVKRGSVDESGKCCSCGDQLACVDIDDAETERFAQSVAALAMEREVKANFSEFQDWLEKNANYEAIVDGANIGLYQQNFTEGGFSVPQLDAVVKKLYERSGNKWPLVILHNKRLRSLWENPSHRNLVEEWNEKGVLYMTPHGSNDDWYWLYAAVKLRCLLVTNDEMRDHIFELLGSNFFLKWKERHQVHYTFVKGNLKLQMPPPYSSVIQESEKGSWHVPILVKGNSSQTWLCITRPNVCESRDEAQ

SEQ ID NO: 71 - protein, 593 aa, Citrus sinensis
MLRGNFLTPSLIRTSPFLTFLSKISLPLMHQSNCHTYRSLLCWHMHSFTKPITDIKQNRFSADLTTGLCTLAFSKKSTVNESSAPNTGTMSNKSKKKARRESPEGVLRHKLDMCSKRGDVFEALRLYDDARSNGITLSQHHYNVLLYVCSCKCGSESSENGDRENDSNLGLKRGFEIFQQMITDKVDPNEATFTSVARLAVAKEDPEMAFDLVKQMKSFGIPPKLRSYGPALFGFCKLGNTDKAYEVDAHMGESGVVPEEPELSALLKLSVDAKKVDKVYEILHRLRTLVRQVSESTFKIIEDWFDSVDAAEIGVLNWDVSKVREGIVRGGGGWHGQGWLGSGKWRVERTQIDENGVCCSCNERLVCIDIDPRETENFASSLSNLACQREVRSDFNKFQEWLGRHGPFDAVIDGANVGLVNQHNFSFYQLNTVVNRLRQMSPSKRMPLVILHKGRVSGGPAQIPKNKKLLDIWRDGGALYTTPPGSNDDWYWLYATVNCKSLLVTNDEMRDHLFQLLGTSFFPRWKEKHQIRLSVSRDGLNLLMPPPYSIVIQESENGSWHVPVITGDDLEAPRQWLCATRARVKSLHSLFSN

SEQ ID NO: 72 - protein, 874 aa, Citrus sinensis
MASSLTVNTLQQQNQLFSLTLCKSSPPTLTVFNFQFLSRFLSSSPPKRTPLLVFKAHVRNTQAKLSTTETEHETSTVTLRTRKGTASGASSLGTRDKRVDSAGEEKDGKRLTKDNNSRKNFAFLKSREMSSGNSSLRSKDKKIGIKSSKTVNREVDNQKMEQRTNDSGQYKVRGITDEKGSKKSKKDRSEQFQLRVELDMCSKRGDVMGAIRLYDKAQREGIKLGQYHYNVLLYLCSSAAVGVVKPAKSGSGMRTLDTFEVSTMNSTELGDSRDMDNNGQLDYGSSPMIDKLESNSSYRFDDLDSTFNEKENLGQFSNGHMKLNSQLLDGRSNLERGPDDQSRKKDWSIDNQDADEIRLSEDAKKYAFQRGFEIYEKMCLDEVPMNEASLTAVGRMAMSMGDGDMAFDMVKRMKSLGINPRLRSYGPALSVFCNNGDVDKACSVEEHMLEHGVYPEEPELEALLRVSVEAGKGDRVYYLLHKLRTSVRKVSPSTADVIAKWFNSKEAARLGKKKWNESLIKDTMENKGGGWHGLGWLGKGKWIVSHTTVGGDALCKCCGEKLAIIDLDPIETEKFAESVASIAIKRERNSSFQKFQKWLDYYGPFEAVVDAANVGLYSQRNFKPARVNAVVNGIRQKFPSKKWPLIVLHNRRITGHKMDQPVNRALIEKWKNADALYATPTGSNDDWYWLYAAIKFKCLLVTNDEMRDHTFQLLGNDFFPRWKERHQVRFSFSDAGPEFYMPPPCSVVIQESEKGNWHIPIASKQDYDDEERRWLCVTRANSHMNRQNSYSSPKDLQPLDHNKGQASSSTRADAKTKSHSSNDSPSVNTKRPARKMYKNLKNILSASVLSNHQSVLSKIEAAEELGDCVIDFEI

SEQ ID NO: 73 - protein, 501 aa, Citrus sinensis; identical to SEQ ID NO: 70

SEQ ID NO: 74 - protein, 581 aa, Populus trichocarpa
MLLCRSSTFFAPSFNAKTSQNFCSYFTKKTHLLSFFKNSPICCNHSYLFAKHIKDSNFIGAHNLFMKKKATFCNSAISATSQSDEKAVGGNVVSKRLKKKARRDAPEGVLRFKLDMCSKVGDVVEGLRLYDEARRNGVELNQHHYNVMLYLCSQNRGENGSDLKLACKRGFEIFQQMIIDKVPPNEATFTNAARLASVMEDPEMAFDLVKQMKGFGIMPKLRSYGPPLFGFCKKGMVDKAYEVDAHMIESGVVAEEPELSSLLKLSADVNNADKMYELLHRLRTSVRQVMESTVGVIEDWFKSEHAAKIGKGDWDVIKVKEGVVRGGGGWHGQGWLGHGQWRVVRTQMDKKGVCGSCGERLACIDIDPRETENFAISLSKLAFGREVKADFIQFQEWLQQHGPFDAVVDGANVSLINQQTFNFSQLNNVVNRLHDMSPSKKFPLVILHKSRVNGGPAQSPYNKKLLERWKNSGALYATPAGSNDDWYWLYAAVSCKCLLVTNDEMRDHLFQLLGTSFFPRWKEKHQVRLSVSRSGIALHMPPPYSIVIQESENGGWHVPTTTGDDLETPRQWLCATRPVKR

SEQ ID NO: 75 - protein, 578 aa, Populus trichocarpa
MLLCRRSTIFVPSFIAKTSPNLFSYFTKKTHALSLFKNSPIRCNHSYLFGKPIKDSNFIGAHDLFVNKKAKFCNLAISGTSRRNEKAVGGNVMSLREKKKARREAPEGVLKFKLDTCSKRGDVVEGLRLYDEARKNGVELNQHHYNVLLYLCSQNGGENVSDLRKQGFEIFQQMIIDKVPPNEATFTNAARLASAMEDPEMAFDLVKQMKGFGILPKLRSYGPPLFGFCKKGMADKAYEVDAHMIEYGVVAEEPELSALLKVSADVNNADKVYELLHRLRTSVRQATESTVGIIEDWFKSKHAAKTGKENWDVRKVKEGVARGGGGWHGQGWLGCGQWRVVRTQMDKEGVCGSCGERLACIDIDPRETEDFAISLSKLALGREVKADFIRFQDWLQRHGPFDAVVDGANLSLINQQTFSFSQLNSVVHRLHDMSPSKKLPLVILHKSRVTGGPAQSPYNKKLLERWKNSGALYVTPAGSNDDWYWLYAAVCYKCLLVTNDEMRDHLFQLLGTSFFPRWKEKHQVRLSVSRSGIALQMPPPYSIVIQESENGSWHVPTTTNDDLETPRQWLCATRPIKS

SEQ ID NO: 76 - protein, 759 aa, Populus trichocarpa
MACFTSNILQQKHVLSITLCKYPSPSLHACKFHFLSHIPGSSPPKHTPLLVATTLASNILHAKLSATDHDSPTKTINSRTRKENNALGFPSSRRIAKRVERKHVKNLTTSVVDEKTEKRFSKDRNTRKNMGFRESTGMGSENCTKDGKKGIRFLATMDSQGVCGEMESRTKNGSDIQVIKVDKIGKGSKQDKVDSSELKLRVRLDMCSKRGDVIAAIQLYDLAQREGIKMGQYHYAVLLYLCSSAAFSEDVKKYALQRGCEIFEKMCKEKVPINEATLTAVARMAMSIGNGDLAFEMVKQMDALGINPKLRSYGPALSVFCSSGDIDKAFYVEKHMLEHGVYPEEPELKALLRVSVEGGKGDKVYYLLHKLRRIVRRVSPSTAGIIVRWFNSKAASRVGKTKWDVKEAIENGGGGWHGQGWLGKGKWTVSCTSVGLDGICKYCGQKLTTIDLDAVETEKFAESVASIAIKRDRDSSFQRFQKWLDYYGPFEAVIDGANAGIYNQGRFMPSKINAVVNGIRQKLPSKKWPLIVLHNKRITGRKMDGPVNKAFIEKWKNADALYATPTGSNDDWYWLYAAIKFKCLIVTNDEMRDHTFHLLGNDFFPRWKERHQVHFRFTDAGPDFDMPPPCSVVIQESEKGHWHIPIETEGEGEGEAEREWLCITRANSRTTRHSITTTPGGSQSVGHGKKQARSSMQTRVAIKPDRLKHNIPDNIRKPPQDYKNLKDILAASGFPDHRTVLSEIETAEELGDTVIDFQI

SEQ ID NO: 77 - protein, 570 aa, Populus trichocarpa
MAMASSSNKKKPKKNQTPESQFNYNLNFYSKSKDLHSAISLYDTAISQDTRLNQHGFNTLLYLCSVSLNDPSTEELALRCGLRIFDHMVSNGIKPNEASITAVARLAAAKGDGDYAFDLVKNVGAYNELPRLRTYDPALFCFCEKLEAHKAYEVEEHMGSMGVGLEEGEIAALLKVSVESRNEKRVYGYLQKLRKMLRCVRGETAKVIEHWFAVFEGSGVELDVDLVREAVSRNGGGWHGLGWIGKGKWVLKRGSVDVGGKCCCCGEQLVSVDIDDDETERFAESVAGLAMQREVKANFSEFQNWLEEHANYEAIVDGANIGLYQQNFAEGGFSISQQLDAVVKDLYNQSGKKWPLIIMHNKRLRALLQNPSTRELIQEWIEKDVLYTTPQGSNDDWYWLYAAVKLRCLLVTNDEMRDHIFELLGSDFFIKWKERHQVRYTFVKGKLELQMPPLFSVVIQESENGSWHVPVAGNGNDSPQSWLCVSRPRACDALEEDSCMEGSKDSNDICCNSKLLSFGRPESLTSCKNKLQSQASFQESDNKITALTCKRKERSPSPSYLHVPCDQRHQ

SEQ ID NO: 78 - protein, 558 aa, Populus trichocarpa
MAMASPANKKKPKSNQTPESQFSYNLNFYSKSKDLHSAISLYDTAISQNTRLNQHNFNTLLYLCSISLNDPSTKDLSLQYGFRVFDHMVSNGIKPNEASITAVARLAAAKGDGDYAFDLVKNIGVYNELPRLRTYDPALFCYCEKLEGDKAYEVEEHMRRIGVGLEEGEIAALLKVSVETRREERVYGYLQKLRKMVRCVREETAKVIEHWFEVFEGNGVELDVGLVREAVSRNGGGWHGLGWIGKEKWVVRRGSVNAGGKCCCCGEQLVSVDIDDDETERFAESVAGLAMEREVKANFSEFQNWLEKHANYEAIMDGANIGLYQQNFAEGGFSFSQLDAVIKDLYNQSGKKQPLIILHNKRLRALLQNPSTRELIQEWIEKDVLYTTPHGSNDDWYWLYAAVKLRCWLVTNDEMRDHIFELLGSDFFVKWKERHQVRYTFVKGNLELQMPPLFSIVIQESENGSWHVPVAGDGNDSPQSWLCVSRPSSCDALKEASCMEESKDSNDSRCNSKLPTFGRPESLASCKHKLHSRDSFQESDDKITALTGKRKERSPSPS

SEQ ID NO: 79 - protein, 584 aa, Eucalyptus
MELAKRFPVLSFIMKSEIPLLLKYRKRFLPLPCSPSSFITRTVNSYPFNPHSMKRINRLTTSSNLNPLPPLHQTSGEKVSRKAKKKERMELPESLLKFKLDMCSRHGKLVEALQLYDEARENGVPLSHYHYNVMLYLCSSAGSGSLGQGGSENDENLKELGMRRGFEIFRQMAIDNVAPNEATFTNAARLATAREDPEMAFDLVKKMKNFGIPPRLRSYGPALFGFCKKGNADKAYEVDEHMVDCGVLAEESELSALLKVSMDAKKADKVYELLHRIRATVRQVSESSAQIVEDWFKSDFAASVGVESWDINKIKEGVVKGGGGWHGQGWLGSGNWRIRRTQMDKKGVCQSCGEKLVCIDIDPKETENFASSLTKLAREKEAKAGFTKFQAWIQKHGPFDAVVDGANAGLVNQKRFNFFQVNFIMNKLREMSPSKRFPLLILHKRRVHGKPDKDPRNQKLLETWENSGALYPTPLGSDDDWYWLYAAVHWNCLLVTNDEMRDHLFQLLGSSFFPRWKEKHQVRISVSKRGIQLHKPPPYSIVIQESENGNWHVPTVTGDDLETPRQWLCATRSKNVSNPLLNLF

SEQ ID NO: 80 - protein, 675 aa, Eucalyptus
MYSKSGDFLGAVQWYDSARKEGIQLGQYHYAVLLYLCASAAVGVVQPAKSGSGARTLNRLDLLNEDVTTNRVKFGEEDEVVSNDLLSIGARGIEGNAGKMDLRSNRTNGNVEYTDEIKSIRQNFNGFPKPNAHVSDRLNDVGKTKGDSSDIENEAIDQEDQVVIFDENLKKFAVEKGFEIYREMCSDKVPMNEATLTSVARMAMSIGDGDMAFDMVKQMKPMGINPRLRSYGPALSTFCNSGDIEKAFEVENHMLKNGVYPEEPELQALLRLSIAVGRGDKVYYLLHKLRTSVRKVSPYTADLIEDWFKGKVASRLGKRKWDERDIREAIKNHGGGWHGKGWLGRGKWSVSRASVGSDGSCKCCGEKLATIDLDPWETEKFAKSVAALALKREKNSSFQKFQKWLDYFGPFEAVIDGANAGLFSQQRFLPAKVNAVVNGIRQKLPLRRWPLIILHNRHITGKKMEVPVNRAIIDKWRNKDALYLTPTGSNDDWYWLYAAIKFKCLIVTNDEMRDHTFQLLGNDFFPKWKERHQVRFSFSDAGPEFHMPPPCSVVIQESENGHWHIPILLEHEYEADRTWLCVTRASSGLATRPEDLQLHQWSEQHVMEDKDPQDGVDPFSETLQPNHDNVRKSPPETHQNLKNIFAAAVSSYDSTLLSELDTAERCGNCIIDFQI

SEQ ID NO: 81 - protein, 574 aa, Eucalyptus
MAAPHPSTHLKSQKKSRKNQTPEANFQVALNSLSKTRDLPGAIALYEGAAASRGVRLNQHHFNALLYICSNAVAEASLKESALDHGFRIHAHMESCGVAPSEATVTAVARLAAARGDGDYAFGLVRKMGERGIAPRLRTYDPALYCFCGALEADKAYEVEEHMRSAGLSLEEPELSALLRVSAETGREERVYEYLHKLRDCVRWVSEETAVSIESWFSGEKAVGVGDVNYDRSHVKDVVLRNGGGFHGLGWIGKGNWVVRRGNVDENGVCSCCGERLACVDIDDMETESFASSIAALACERESKANFSDFQDWLEKHADYEAIVDGANIGLYQQNFADGGFSVPQLDAVVKELYGRSKGKWPLVILHNKRLKGLLESSPHKQLLQEWIDKGVLYTTPSGSNDDWYWLYAAVRLRCLLLTNDEMRDHIFELLGSKFFSKWKERHQVRYTFVKGSPVLIMPLPFSPVIQESETGSWHVPVKDDSNEEIVRTWVCITRPSVCKSSNGVLASKESPEGSNNFLNDHKLLNSSKPGTTTEDSNALGSIGFSQDCVNNTNIMTRKRKERSSSPPPLASSS

SEQ ID NO: 82 - protein, 589 aa, Ricinus communis
MLRGSSFAPSLNRASPLFSFFTKIPFFSSFQNNFHTIRRPFLHYHYYVFPKPVCNIQASRFCMERRVQFCSSALSAKPQIHESSALAAKKVSNKAKKKARQESPEGVLRSKIDNCSKHGNLVEALRLYDEARINGVQLNQHHYNVLLYLCSSGSSVELGGNGANEKASNMQFKRGFEIFQQMVIDKVPPNEATFTNAARLAIAMEDPEMAFDLIKQMKCFDILPKLRSYGPALFGFCKKGMADRAYAVDAHMAESGVMPEEPELSALLKLSVDIKRADKVYEMLHRLRATVRQVTETTIDIIEAWFKSEDASKIGEEKWDVSKVREGVVRGGGGWHGQGWLGSGQWRVVRTQIDAKAVCNSCSEKLVCIDIDPSETENFATSLTNLACQREVKADFVRFQEWLQKHGPFDAVIDGANLGLINQTNFSFRQLNTVVSKLRQMSPSKRLPLIILHRSRVTGGPAQNPNNMKLLEFWKKSGALYATPTGSNDDWYWLYAAVSCNCLLVTNDEMRDHLFQLLGTSFFPRWKEKHQVRLSVSRSGIALHMPPPYSIVIQESENGSWHVPTISEDDLETPRQWLCASRTRNKVVL

SEQ ID NO: 83 - protein, 745 aa, Ricinus communis
MSTRYKGATKERKYMDNQLISGRMEKKPRKGSDNKVKEEKSGKWSKRNKGDPQEVKFRLELDKCCKRGDVMAAIQLYDLAQREGIKMGQYHYTVLLYLCSSAAAGVVQPGKSGRGGRASNSLAVSDEVSSASVVEFRELRDKNDVDATESDTKILNNVNKVIDSGRNPGSKDKMELKSSNRFNDSDSTSNERKNLSQIPIVVSDSNYQQLECLSFPAKNNDGKYHDGNGILVSEDIKKYALERGFEIYEKMCMDKIPMNEATLTAVARIAMSMGNGDMAFDMVKQMKLLGLNPRLRSYGPALAAFCSSGDADKAFTVEKHMLDHGVHPEEPELEALLRVSVEAGKGDKVYYLLHKLRTSVRKVSPSTANIIIEWFKSKAASRVGKTKWDKRVVKEAIANGGGGWHGQGWLGKGKWTVSCSSVGVDAFCKSCGKKLATIDLDPTETESFAESVASIAIKREKDSSFQKFQKWLDYYGPFEAVVDGANVGLLGQKRFIPSKINAIANGIRQKLPSKKWPLIVLHNRRVTGHKMDEPVNKSLVEKWKHADALYATPTGSNDDWYWLYAAIKFKCLIVTNDEMRDHTFQLLGNDFFPKWKERHQVHFGFSDAGPVFHMPPSFSVVIQESENGHWHIPIASDTDYEPERAWLCITRAKLPLPRKDSITIKPEESQFVKRSSGQAKLPTKTRVKAKQGTLNHGSDEDNSPEQVYKNLRNILSASGFTDHRTVLSEIEAAEKLGDSVIDFQI

SEQ ID NO: 84 - protein, 561 aa, Ricinus communis
MATGTTTTAPVGKKKPNKKNQTPESQFNYNLNFYSKSKDLNSAISLYKTAISNKTQLNQHHYNTLLYLCSISLNDPSEKELALQNGFDIFEHMVATGIKRNEASITAIARLAAAKGDGDYAFNLIKNMLVDNQLPRLRTYDPVLFCFCEKLEAFKAYEVEDHIVSMGMNLEELEIAALLKVSVETKNKERVYGYLQKLRKTVRCVKEETAKIVEDWFKDFEVNGKELDVGLVRKAVVKNGGGWHGLGWIEKGKWGVKRGNMDMDGRCCCCGESLACVDIDDLETERFAGSLAGLAMEREVKANFSEFQDWLDKNADYDAIVDGANVGLYQQNFAEGGFSISQLDAVVKELYDRSGKWPLIVLHNKRVRAILENPSQRNLIQEWTEKDILYTTPHGSNDDWYWLYAAVKLKCLLVTNDEMRDHIFELLGSSFFLKWKERHQVRYTFVKGKLKLQMPPPFSVLIQESEKGSWHVPIAGDGNEDSAQSWLCITRSSACYAPDKDEMNIETFETEYQDRILLSPSKANSITGYNDILDSEESFPHSENKPATPTGKRKGRSTSPS

SEQ ID NO: 85 - protein, 558 aa, Medicago sativa
MLRGTVSMAKRTPLFSILTHRPFLSSFSLKHTFNRATLPFTTTTINNTLSQTPTSQNNTESTTHPIKLSTKARRKAAQESPVGILQKKLNNCSKTSDVLQALNLYDEARKAHVPLNLDHYNKLLYLCTVQNGDGSFFHLGLQRGFEIFEQMLRDNVEPNEATFTNAARLAAAKEDPEMAFELLKQMKRVGIAPKLRSYGPALYGFCARGDAMKAYEVDDDMIESGVMAEEDELCALLEVSVEVKNEDKVYEILHRLRAVVRQVSESTLKVIEDWFESEYAMKIGKREWDDEEIREGFVRGGGGWHGQGWLGSGEWKVVKTNVDEDGMCLSCSEKLVSIDIDPKETENFAASLSKLAHEKQPKANFNHFQKWLEKNGPFDAVVDGANVGLANIAEFSFKQLDYVVRQLRQLSPSKRLPLIILHVNRVTGGPAQNPNNKRLIENWKKNGVLYATPHGSNDDWYWLYAAVSCKCLLLTNDEMRDHLFQLLGSSFFPRWKEKHQVRVSVSTRGASLVLPPRYSLVIQESANGSWHVPTVVSDEPDIPRKWLCVTRSRKKLIT

SEQ ID NO: 86 - protein, 479 aa, Medicago sativa
MHRDKRNGIMVSEVVKEYALQRGFEVYENMRMSKVEMNEAALTSVARMAMALSDGDKAFEMVKQMKILGINPRLRSYGPALSTYCNNGEIDKAFDVEKHMLEHGVYPEEPELEALLRVSIRGGKSDRVYYVLHKLRSSVRKVSTTTADLIVDWFKSKIALKVGKRKWDNGLIMKAMQNNGGGWHGTGWLGKGKWQVLQTSVRKDGMCKCCGVQLATIDLDPVETENFAKSVASIAISNEKNSNFQTFQKWLDYYGPFEAVIDAANINAVVNELRQKLPSKKFPLIVLHHRRIKGDKRDVPINKALVDRWNNANVLYATPTGSNDDWYWLYAAIKFKCLLVSNDEMRDHLFQLLGNDFFPKWKERHQVRFGFSDAGLEFYMPPPCSVVIQESEEGHWHIPIEAELNDEAERRWLCITRAKLDMVSGDSSTTSKDEKPLQNGEQAKSVTRKESAKELQYQNLVNHKKMIGTPQESYKNHRK

SEQ ID NO: 87 - protein, 482 aa, Medicago sativa
MNDKDRDKRNGIMVSEVVKEYALQRGFEVYENMRMSKVEMNEAALTSVARMAMALSDGDKAFEMVKQMKILGINPRLRSYGPALSTYCNNGEIDKAFDVEKHMLEHGVYPEEPELEALLRVSIRGGKSDRVYYVLHKLRSSVRKVSTTTADLIVDWFKSKIALKVGKRKWDNGLIMKAMQNNGGGWHGTGWLGKGKWQVLQTSVRKDGMCKCCGVQLATIDLDPVETENFAKSVASIAISNEKNSNFQTFQKWLDYYGPFEAVIDAANINAVVNELRQKLPSKKFPLIVLHHRRIKGDKRDVPINKALVDRWNNANVLYATPTGSNDDWYWLYAAIKFKCLLVSNDEMRDHLFQLLGNDFFPKWKERHQVRFGFSDAGLEFYMPPPCSVVIQESEEGHWHIPIEAELNDEAERRWLCITRAKLDMVSGDSSTTSKDEKPLQNGEQAKSVTRKESAKELQYQNLVNHKKMIGTPQESYKNHRK

SEQ ID NO: 88 - protein, 435 aa, Lotus
MLYLCSIPHSDSMDSGQVGLERGFEIFQQMMREKVKPNEATFTNAARLAAAKEDPQMAFELLKQMKDVGIAPKLRSYGPALFGFCKRGEFEKACEVDADMIESGLVAEEPELSALLEVSVSAKKEDKVYEILHRLRATVRQVSESSLQIIEDWFNSEYAMKVGEENWDADKVRDGIVRGGGGWHGQGWLGSGQWKVVKTHVNEDGMCLSCGEKLVSIDLDPKETENFATSLSKLACQRETQSNFNNFQKWLKQHGPFDAVVDGANVGLANQHNFSFSQLNNVVKQLRQISPSKRLPLIILHVSRVTGGPAQNPNNKRLLEHWRENGALYATPQGSNDDWFWLYAAVSCKCLLLTNDEMRDHLFQLLGSNFFPRWKEKHIRVSASAGRVSLVMPPRYSIVIQESANGSWHVPTVTSDDDHEIPRKWLCATRSSNKS

SEQ ID NO: 89 - protein, 487 aa, Lotus
MKLKIAFDMCSKRGDIMEALSLYDAARSEGLKLQQHHYTVLLYLCSSAAVGVVQPAKSGSGARTLNAQVELVNHEDNDNSVSVDRNERDFSNGILVSGDVKKYALKRGLEVYESMSQSKVKMNEASLTSVARMAMAIGDGDMAFEMVKQMKSLGINPRLRSYGPALSTFCNNGEIDKAFAVEKHMLEHGVCPEEPELEALLRVSNSIRAGKGDKVYYVLQKLRTSVRKVSPSTAQLIIDWFKSTQASRVGKRKWDKKLIMEAIENHGGGWHGQGWLGKGKWRVVHTAIGNDGICKCCGVHLATMIKWLDYYGPFEAVVDGANVALFGQGRFIPSKINAVVNGIRQKLPSKKFPLIILHNRRIKGDKGGEAINGALIDRWNNADALYATPTGSNDDWYWLYVAIKFKCLIITNDEMRDHLFQLLGNDFFPKWKERHQVHFSISDTGPEFYMPPPCSVVIQESEEGHWHIPIETELSNESERRWLCITR

SEQ ID NO: 90 - protein, 616 aa, Aquilegia
MQKNLFKQFRFNNILNPLKATKMTFSSHLSPSYLLKNSSFFNFFIKTHSILSNNTNNRALLHLLQYPSLLSSKPIIKNNFFNLSTNKKHYLCTSTASAISHNRNSSTPNVRTPSKRAQNKAQRQSPEGQLRYKLDMCSKDGDLVEALRIYDDARSNKFSLSKHHYNVLLYLCSSSDVLVQENVFNQKDEKSRNLGLRRGFEIFKQMGIDGIAPDEATFTNASRLAAKMEDPEMAFELLKKMMNSNIPPKLRSYEPALFGFCNKGEANKAYEVDAHMLASGVTPEEPQLVALLRVSVNVKNADKVYEIIHRLRASVRQVSDSTAKIIEEWFKSKEAMEVGKESWDVNKVKEGIVKGGGGWHGQGWLGKGEWKVVKTEMDENGVCHCCGERLVCIDIDPLETENFANLLSRLACQREAWANFNQFQNWLKNNGPFDAVIDGANVSLNNGHAFSFFQLNAVVERVREFSPTKRLPLIILHTGRVVGGPANSPKNKALIEQWRRFGALYTAPKGSNDDWYWLYAAVNCKSLLVTNDEMRDHLFQLLGTSFFPRWKEKHQVRYKVSRDGTVLQLPPPYSIVIQESERGGWHIPIASADDVDTPRQWVCASRASTSLNSAIS

SEQ ID NO: 91 - protein, 822 aa, Aquilegia
MATMSTTTTTAFNTLQQKHLFSMTLCKYPSSLSFTSTCFISHFFKFHQEFTSLKTLKETFCSNNNNVIMCSLEHQHSIKTLNPTTQKEYNYGFFPLKSRDERVGRKAKVSSIVGEKTGKKYRKDVDSRRKREMGSGVSSLGSVEERVEIKSKVADKVVDEKMTKFSKKSNGSSKLRNETSNKNSSGSNADFQVGEGKSRKRRKKEKVETPEFKLKAGLDMCSKRGDLLSAISLYDTAQKEGVKLGQYHYTVLLYLCSSAAVGVIRPAKSGSGSRTSDKLDLMNEVPNENVHVRLDPSTSSHGYPIDSSSESHVLSSNKVQEINNSELEPVKYVIPLGNKTERLANKLFDKTSNTSNGFYTGIDQEDSDREREGNSNQEDHKIQVSEDVKKYALVRGFEIYENLCLEKIPLNEATLTSVARMAMSMGNGDMALEMVNKMKEMGINPRLRSYGPALFTFCKTGDIDNAFMVEEHMLENGVYPEEPELEALLRLSVEAGRGDKVYYLLHKVRNSIRKVSPSTADLIERWFRSKPASTVGERNWDHRLIMEAMENGGGGWHGQGWLGKGRWNSARTFIGTDGVCESCGDKLVTIDLDPTETENFAKSVASIAAKRERKSCFQNFQKWLDYYGPFEAVVDAANVGLYSQRHFSTSKVNAIVNGIRQKLPSKKWPLIVLHNKRITGGRMDEPANKTLVEKWKNADALYATPTGSNDDWYWLYAAIKFKCLLVTNDEMRDHIFQLLGNDFFPRWKERHQVHFNFSDSGPEFIMPPPCSVVIQESEKGHWHIPIESEVASERERTWLCVTRSDPERPGSPKKHKGIYSEE

SEQ ID NO: 92 - protein, 547 aa, Aquilegia
MENSNQTNQSKKRKKTLNLEGQFMYDLGTCSKSNDLAGALSLYEKAISQNLRLNHNHLNTLLYLCSNSLHDLASKDSAIEKGFGIYERMIANNINPTEATITAVARLAAANGDGDFAFELVKSMGKYKIVPRLRTFDPALFAFCEKLEAEKAYEVEELMVSMGIHLEEPEFAVLLKVSSEVGREDKVYLYLHKVRNCTRCVSLVTGEIIESWFNKGLASEVGVSEWDENGIKDAMLKNGGGWHGQGWLGKGKWVVSKSNINLEGCCCSCGERLVCVDIDRAETEKFAESVASLATKREAKSDFRVFQEWLDNHSGYEAIVDGANVSLYQQNFADGGFSISQLEAVVKDLYDRSGKWPLVIMHNKRVSSLMDNPSNLKILEDWKNQGTLYTTPNGSNDDWYWLYAAVKLKCLLVTNDEMRDHIFELFGSNFFLKWKERHRVRFTFLKNNLRLLMPPSYSLVIQESEKGSWHVPIDGECNDELLRTWLCITRPRLHDYSSEVLKSSHSLVLDRPFSNHMSTMNGSHNNESKALSGKRKSRSPSPSKGHP

SEQ ID NO: 93 - protein, 572 aa, Eutrema halophila
MLRATCFTPSLSRACRPLFVMILRIPSVHLPHHRSFSPFRGYHTSLPVKGTRDRRLLLVEHKRHLCTMPVAAKQSQASPSENLSRKARKKAIQQSPETLLKQKLDMCSRNGDAVEALRLYDEAKRNGVQLSQYHYNVLLYVCSLSEAGTESSPNPGLSRGFDIFKQMIVEKVVPNEATFTNGARLAVAKDDPEMAFDMVKQMKAFGIQPKLRSYGPALFGFCRKGDADKAYEVDAHMLESEVVPEEPELTALLRVSMDIKNTDKVYETLQRLRDLVRQVSKPTFDTIEEWFNSEAAAKAGVEKWDLKKIKDGVVSGGGGWHGQGWLGTGKWNVTRTEMDENGVCKCCKDKLVCIDINPVETENFAASLTRLACEKEVKSNFNQFQEWLQRHGPFDAVIDGANMGLVNQRSFSFFQLNNVVQRFQQNSPSKRLPLVILHKSRVIGGPATYPKNRALLEKWKNAGALYATPPGSNDDWYWLYAAVSCKCLLVTNDEMRDHLFQLLGNSFFPRWKEKHQVRISVSREDGLTLHMPPPYSIIIQESEDGTWHVPMSVKDDLQTSRQWLCARRSKTH

SEQ ID NO: 94 - protein, 555 aa, Eutrema halophila
MAASDQRRSRQEEGSPSKPNKKKKANRNPETNLLFNLNSCSKSKDLSAALALYDAALVSNDVSLSQQHFQTLLYLCSASISDPSLQSLAIDRGYQIFDRMVSSGISPNEASVTSVARLAAAKGDGDYAFKIVKDFVSAGGTSIPRLRTYAPALLCFCEKLEAEKGYEVEEHMDAAGIELEEAEISALLKVSCATSREDKVYRYLHKLRESVGYVCEETLKVIEEWFCGEKAGEFGDNGIGSDAGMLREAILKNGGGWHGHGWIGEGKWIVKKGNVSSTGRCLSCSEQLACVDTNEVETQKFVDSLVSLAMERKSKMNSCETKGDFSEFQDWLEKHGGYEAIVDGANIGLYQQNFADGGFSLPQIEAVVKELYHKSGNNKWPLILLHKKRVKTLLENLTHRNLVEEWINNGVLYATPPGSNDDWYWLYAAAKLKCLLVTNDEMRDHIFELLGNSFFQKWKERHQVRYTFSKGNLKLEMPSSFSVVIQESEKGSWHIPVSCQNIEESSRTWICIRRKSVLDSPKFNEKLATSGNGKILSSCNNNSLLSSCDAGNDQN

SEQ ID NO: 95 - protein, 522 aa, Eutrema halophila
MAASDQRRSRHHDESPSNPNKRKKTSQKPEKNLLINLHSCTKSKDLEAALALYDEAITSGDVRLGQQHFQSLLYLCSASISDPDLETLAIYRGFQIYDRMVSSGISPNESTVTAVARLAAAKGDGDFAFKLVLDIVAGGVSVPRLRTVAPALLCFCERLEARQAYEVEEYMDALGIVLEEVEISALLKVSIGTEQANKFYKYLHKLRENVGCVSEETSKIIEEWFREKASEVRGKVSDIELLRAAVLKNGGGWHGLGWVGEGKWIVKKGNVSPAGKCLSCGEHLACVDANEVETEKFVNSLVALAMERKAKMNSCEPTADFSEFQEWLEKHGDYEAILDGANIGLYQQNFADGGFSLPQLEAVVNELYKKSGNKKWPLILLHKKRVDALLGNPNHRELVEEWINNNVLYTTPPGSNDDWYWLYATAKLKCLLVTNDEMRDHIFELLSTSFFQKWKERHQVRYTYVKGCLKLEMPPPFSVVIQESEKGSWHVPITCQNIEESVRNWICIRRESLYIHSREKIQ

SEQ ID NO: 96 - protein, 572 aa, Eutrema parvulum
MLRATCFTPSLSWAIRPLFALILRIPSFHLPHRSFSPVHGYHTSLLVKGRRDRRLILVDHNRHLCTVPLAAKQSPALPSENVSRKARKKAIQQSPEAMLKQKLDMCSRNGDVLEALRLYDEAKRNSLQLSQYHYNVLLYVCSLSDAETESSSPNPGLSRGFDIFKQMIVEKVVPNEATFTNGARLAVAKDDPEMAFDMVKQMKAFGIQPKLRSYGPALFGFCKKGDADKAYEVDLHMLESEVVPEEPELTALLKVSMDTENAEKVYESLQRLRDLVRQVSKSTFDAIEEWFKSEAAAKAGVEKWDVKKIRNGVVSGGGGWHGQGWLGTGKWNVTRTEMDENGVCKCCKEKLVCIDINPVETENFAASLTRLACQKEVKASFNQFQEWLKRHGPFDAVIDGANMGLVNQRSFSFFQLNNVVQRFQQISPSKRLPLVILHKSRVIGGPATYPKNRALLEKWKNAGALYATPPGSNDDWYWLYAAVSCKCLLVTNDEMRDHLFQLLGTSFFPRWKEKHQVRISVSRENGLTLHMPPPYSIIIQESEDGTWHVPMSVEDDLQTSRQWLCARRSKTL

SEQ ID NO: 97 - protein, 554 aa, Eutrema parvulum
MAATGQRRSRQQDESPSKPNKKKKANKNPEKNLLFNLNSCSKSKNLSAALALYDAAVTSNEVQLSQQHFQTLVYLCSASISDPSLQTVAIDRGYQIFDHMVSSGISPNEASVTSVARLAAAKGDGDYAFKIVKDFASVGGISIPRLRTYAPALLCFCERLEADKGYEVEEHMDAAGITLEEAEISALLKVSAATGRENKVYRYLHKLREYVGCICEETSKIIEEWFCGEKAGEVSDKEIGADAGLLREAILKNGGGWHGHGWVGEGKWVVKKGNVSSAGRCLSCSQHLACVDTDEVETQKFVDSLVSLAMERKAKMNSCETKVDFSEFQDWLEKHGEYEAIIDGANIGLYQQNFADGGFSLPQLEAVVNELYHNSGDNKWPLILLHKKRVKTLLENPANKNLVEEWINKGVLYATPPGFNDDWYWLYAAAKLKCLLVTNDEMRDHIFELLGNSFFQKWKERHQVRYTFAKGNLKLEMPSPFSVVIQESEKGSWHVPVSCQNNEDSSRTWICISRQSTIHSPKVNGKVETSGNGKIISSCNNSLLSSCDAGINEN

SEQ ID NO: 98 - protein, 517 aa, Eutrema parvulum
MAASDQRRSRHDDESPSKPNKKKKASNNPEKNLLVNLHSCSKSKDLSAALALYDAAITSGDVRLTQQHFQTLLYLCSASLSDPSLQTLAIDRGFQIFELMVSSGISPNEASVTAVARLAAAKGDGDYAFKVVKDIVAVGGVSVPRLRTYAPALLCFCEILEAEKGYDVEEHMDASGIALEEVEISALLKVSVATGRENKVYRYLHKLREFVGCVSEETSEIIEEWFCREKASKVSGSGIGSDIVLLRAAVLKNGGGWHGLGWVGEGKWIVKKGNVTPAGKCLSCGEHLACVDTNEVETENFVNSLVALAMERKAKMNSSEPMADFSEFQEWLEKHGDYEAILDGANIGLYQQNFADGGFSLPQLEAVVKELYNKSGNKKWPLILLHKKRVNALLENPNHKNLVEGWINNNVLYTTPPGSNDDWYWLYAAAKFKCLLVTNDEMRDHIFELLSTSFFQKWKERHQVRYTFVKGSLKLEMPPPFSVVIQESEKGSWHVPITCQNCEESLRNWICITRQSL

SEQ ID NO: 99 - protein, 575 aa, Mimulus
MLFRVGSLSSKTSLLLSFFRKSSTAQFVQSKRFDSLLWRRYTSVTILINPQKQAYGTISMARKASHYSTTSAEALVQSSTNSGTRMSKKKARREAPEMILRVKLDLCSKDGNLTEALCLYNEARANGVQLNVHHYNVLLYLCCPNRDLSKEDEGNLTMLDRGFEIFKQMGIDKVEPNEATFTNLSRLAAAKEDPRLAFDLVKQMTEHGIVPKLRSYGPALFGFCKKGMADEAYEVDFHMRDNGVLPEETELTALLRVSSEFKKEGKVYEMIHRLRTTVRQVSEETAATITDWFKSKIASEIGEEKWDMEKVRKGFLEGGGGWHGQGWLGKGDWRVVRTTMDESGVCRSCGEKLVCIDIDPKETEKFAELLATLASQKEARTNFAKFQEWLQRQGPFDAVVDGANLGLANKHTFSFSQIARVVNELRQISPSKKLPLIILHQGRVSGGPAQNPNNKRLLESWKKGGSLYATPQGSNDDWYWLYAAVSCKCLLVTNDEMRDHLFNLLGNNFFPRWKEKHQARLKPSGDGLLTLHMPPPYSHVIQESKQGNWHIPTVTGDDLETPRQWICATRTRLHE

SEQ ID NO: 100 - protein, 573 aa, Mimulus
MCNLQNQLTKAYYMAFLSPKTPPILSVSPNSLFPSTKCIDYISCNAKNQVRKSPPIARTPRFSTSSGGQSLLQNERYSVTRRIKKQALRDSPEIMLRVNLDQCSKNGDLDEALRLYHEAKLNNIQLNVYHYNVLLYLCSLRSDDDGEEGLNPETLEKGFEIFKEMIIDRVELNEATFTNVSRLAAAKEDPELAFNLIKKMKDQGIGPKLRSYGPALFGFCKKGMADEAYEVDSHMVDNQVSAEESELSALLKVSSDVKREEKVYEMMHRLRATTRQVSEETAAVVEDWFLSERAAEVGLENWDTGKIKKGVLKGGGGWHGQGWLGGGDWRVVGTTMDEAGVCQSCGEKLVCIDIDPKETENFAKSLSELASKKEATTGFFQFQEWLQRHGPFDAVVDGANVGLANQHTFSFSQIKGVVNRLRELSPSKKLPLVVLHQNRVNGGPAQYPNNKKLLESWKKAGALYATPVGSNDDWYWLYAAVSSKCLLVTNDEMRDHLFNLLGNSFFPRWKEKHQVRLKPSSDGIRLHMPPPYSIVIQESEQGSWHIPTVTEDDLETPRQWLCATRARNSMPTP

SEQ ID NO: 101 - protein, 717 aa, Mimulus
MASFTFKPLLLQQTQLHLSSFSLSKNFNFYFSYDITPTKHQLKKLRVSAHSATSLSEDVAEANSGNDVNADFLSGLSSFAVADDVSNNSHVRNHNRAQKPIEKRVILKDRHAAKIGLNSKSRKQVVSSSSSSSSSSSSSIRFKATHSVNSNLIEHKNNNKVPDKQKEKRRSKKDKIDSPESTLRVGLDMCSKRGDVVGAIKLYELAKKEFIKLGQYHYAVLLYLCSSAATEVKRAALRKGFEIYNEMRLENIPMNEATFTSVARMATAFGDGDMAFDMVKQMKEYGINPRLRSYGPALSIFCSNGDIDNAFKVESHMLEHGVYPEEPELEALLKVSIDAGKSEKVYNVLHKLRTSVRQVSSSTAELIERWFTSKTASRVGKRKWDQNLIIEAMKNGGGGWHGKGWLGKGKWTVSRSPVDSDGLCKCCGKKLVTIDLDPVETENFAKSVASIAAEREKDSSFQKFQKWLDYYGPFEAVVDAANVGLYSQRSFKPSKVNAVVNGIRQMLHCRKWPLIVLHNRRINGGKMEEPFNKALIEKWRTADAIYATPTGSNDDWYWLYAAIKCGCLLVTNDEMRDHLFQLFGNDFFPKWKERHQVRFSFTETGPTFRMPPPCSVVIQETEEGQWHIPIVSESENEDERIWLCCSRSNSSSPSSSSHHQNQESEIPRTQKKKREARISVETVFGESGKRNHRKNNTLLAQLETAEQLGDCAIDFQI

SEQ ID NO: 102 - protein, 510 aa, Mimulus
MDHHNTRRKKQKLSPESQFRSTLDQCSKTKDLTAAISLYESSPSPTLTLGNLNSFLYICSNSLSDPETRQPAIEFGFKLFHHHSDGDNFKPNEATLTALSRLAAARGDGDYAFELAKSVKKYGVAPKLRTFSPALICFCGGAAAAADKAYEVEEYVESVGLHLEEPELAALLKVSIESGKEKKVYEYLHKLRATLREVDESTVAIIESWFSGKNAADVSVVSLDSDRIREANTRNGGGWHGLGFLGNGEWALQRSKIASYGQCCACNEQLVCVDTDTEETEKFAQSVASLAMERELHSNFKEFQDWLEKHSEYETVVDGANIGLYQQNFAEGGFSVTQLDAVVKETHSKSKKWPLVVMHKKRVRSILEDASKRELIEEWLDQGVLYGTPYGSNDDWYWLYAAVKLKCLLVTNDEMRDHIFELIGSNFFSRWKERHQVRYTFTKGGGLKLIMPPSYSLVIQESEKGSWHVPIAGEISDESSRTWLCVTRSGSIDAEEVSGNLIRNGSNNTS

SEQ ID NO: 103 - protein, 505 aa, Jatropha
MWRGSFLAPSFNRTSPLFSFFTKFPLLSIFRSVSNNFRCPLLHYHSCHFPKPLHYIQAYQFAMDRRARFCSFAHSTTPQIHESSVSGTNKVSRKSNKKARQESPEWVLKWKLDSCSKSGDLVEALRLYDEARSNGIQLTQHHYNVLLYLCSSGSSVELKGDRVVANASDLSFKRGFEIYQQMVTDKVAPNEATFTNVARLAFASEDPEMAFDLVKKMKGFDILPKLRSYGPALFGFCKKGMADRAYEVDTHMAESEVIAEEPELSALLKVSADAKRVEKVYEMLHRLRYTVRQVSDSTIGIIEDWFKSEDASKLGKQNWDVNKVREGIVRGGGGWHGQGWLGSGEWKTVRTKIDEQGICCSCGQKLVCIDIDPRETENFATSLANLACRKEVKADFVLFQYWLYAAVSCKCLLVTNDEMRDHLFQLLGTSFFPRWKEKHQVRVSVSRSGPALHMPPPCSIVIQESENGSWHIPTVTDDLETRRQWLCATRERHNYSDNNLAVSVA

SEQ ID NO: 104 - protein, 572 aa, Arabidopsis thaliana
MLRLTCFTPSFSRACCPLFAMMLKVPSVHLHHPRFSPFRFYHTSLLVKGTRDRRLILVERSRHLCTLPLAAAKQSAASPSENLSRKAKKKAIQQSPEALLKQKLDMCSKKGDVLEALRLYDEARRNGVQLSQYHYNVLLYVCSLAEAATESSPNPGLSRGFDIFKQMIVDKVVPNEATFTNGARLAVAKDDPEMAFDMVKQMKAFGIQPRLRSYGPALFGFCRKGDADKAYEVDAHMVESEVVPEEPELAALLKVSMDTKNADKVYKTLQRLRDLVRQVSKSTFDMIEEWFKSEVATKTGVKKWDVKKIRDAVVSGGGGWHGQGWLGTGKWNVKRTEMDENGVCKCCKEKLVCIDINPVETETFAASLTRLACEREVKANFNQFQEWLERHGPFDAVIDGANMGLVNQRSFSFFQLNNTVQRCQQISPSKRLPLVILHKSRVNGGPATYPKNRALLEKWKNAGALYATPPGSNDDWYWLYAAVSCKCLLVTNDEMRDHLFQLLGNSFFPRWKEKHQVRISVTREDGLKLNMPPPYSIVIQESEDGTWHVPMSVEDDLQTSRQWLCAKRSKTP

SEQ ID NO: 105 - protein, 528 aa, Arabidopsis thaliana
MAASDQHRSRRHDESSSRPNKKKKVSRNPETNLLFNLNSCSKSKDLSAALALYDAAITSSEVRLSQQHFQTLLYLCSASITDISLQYLAIDRGFEIFDRMVSSGISPNEASVTSVARLAAAKGNGDYAFKVVKEFVSVGGVSIPRLRTYAPALLCFCEKLEAEKGYEVEEHMEAAGIALEEAEISALLKVSAATGRENKVYRYLHKLREYVGCVSEETLKIIEEWFCGEKAGEVGDNGIGSDVGMLREAVLNNGGGWHGHGWVGEGKWTVKKGNVSSTGRCLSCSEQLACVDTNEVETQKFVDSLVALAMDRKTKMNSCETNVVFSEFQDWLEKHGDYEAIVDGANIGLYQQNFVDGSFSLSQLESVMKELYRESGNNKWPLILLHKRRVKTLLENPTHRNLVEEWISNGVLYATPPGSNDDWYWLYAAAKLKCLLVTNDEMRDHIFELLGSTFFQKWKERHQVRYTFVKGNLKLEMPSPFSVVIQESEKGSWHFPVSCENNEESSRTWMCISRQSILDSPKSNGKIP

SEQ ID NO: 106 - protein, 517 aa, Arabidopsis thaliana
MAGTDNRRSRHDDESPKNPNKKKKGNRNPEKSLLINLHSCSKRKDLSAALALYDAAITSSDIRLNQQHFQSLLYLCSAFISDPSLQTVAIDRGFQIFDRMVSSGISPNESSVTAVARLAAAKGDGDYAFKLVKDLVAVGGVSVPRLRTYAPALLCFCDTLEAEKGYEVEDHMDASGIVLEEAEISALLKVSAATGRENKVYRYLQKLRECVGCVSEETSKAIEEWFYGVKASEVSDNGIGSDIELLRAAVLKNGGGWHGLGWVGEGKWIVKKGNVSSAGKCLSCDEHLACVDTNEVETEDFVNSLVTLAMERKAKMNSCEPMADFSEFQEWLEKHGDYEAILDGANIGLYQQNFADGGFSLPQLEAVVKELYNKSGSKKQPLILLHKKRVNALLENPNHRNLVEEWINNNVLYATPPGSNDDWYWLYAAAKLKCLLVTNDEMRDHIFELLSNSFFQKWKERHQVRFTFVKGCLKLEMPPPFSVVIQESEKGSWHVPITSQDKEESLRSWMCITRQSS

SEQ ID NO: 107 - protein, 572 aa, Arabidopsis lyrata
MLRLTCFTPCFSRACCPLFAMMLKVPSVHIHHPRFSPFRSYHTSLLVKGTRDRRLILVERSRHLCTMPLAAAKQSAASPSENLSRKAKKKAIQQSPEALLKQKLDMCSKKGDVLEALRLYDEARRNGVQLSQYHYNVLLYVCSLAEAATESSPNPGLSRGFDIFKQMIVDKVVPNEATFTNGARLAVAKDDPEMAFDMVKQMKAFGIQPRLRSYGPALFGFCRKGDAGKAYEVDAHMVESEVVPEEPELAALLKVSMDTKNADKVYEMLQRLRDLVRQVSKSTFDTIEEWFKSEAAAKAGVKKWDVKKIRDAVESGGGGWHGQGWLGTGKWNVKRTEMDENGVCKCCKEKLVCIDINPVETETFAASLTRLACEREVKANFNQFQEWLERHGPFDAVIDGANMGLVNQRSFSFFQLNNTVQRCQQISPSKRLPLVILHKSRVNGGPATYPKNRALLEKWKNAGALYATPPGSNDDWYWLYAAVTYKCLLVTNDEMRDHLFQLLGNSFFPRWKEKHQVRISVSREDGLTLHMPPPYSIVIQESEDGTWHVPMSVEDDLQTSRQWLCAKRSKTP

SEQ ID NO: 108 - protein, 530 aa, Arabidopsis lyrata
MAASDQHRSRHHDESSSRPNKKKKISRSPETNLLFNLNSCSKSKDLSAALALYDAAVTSSELRLSQQHFQTLVYLCSASISDTSLRSLAIDRGFEIFDRMVSSGISPNEASVTSVARLAAAKGDGDYAFKVVKDFVSVGGVSIPRLRTYAPALLCFCERLDADMGYEVEEHMEAAGIALEEAEILALLKVSAATGRENKVYRYLHKLREYVGCVCEETSKIIEEWFCGEKAGEVSDNGIGSDVGMLREAVLKNGGGWHGHGWVGEGKWTVKKGNVSSTGRCLSCREQLACVDTNEVETQKFVDSLVALAMERKAKMNSCETQVDFSEFQDWLEKHGNYEAIVDGANIGLYQQNFVDGSFSLPQLESVVKELYRESGNNKWPLILLHKRRVRALLENPTHRNLVEEWISNGVLYPTPPGSNDDWYWLYAAAKLKCLLVTNDEMRDHIFELLGSSFFHKWKERHQVRYTFVKGNLKLEMPSPFSVVIQESEKGSWHFPVSCENNEESSRTWMCISRQSVLDSPKSNGKLATS

SEQ ID NO: 109 - protein, 517 aa, Arabidopsis lyrata
MAGTDHRRSRHHDESPSKPNKKQKGSRNPEKSLLINLHSCSKRKDLSAALALYDAAITSSDIRLNQQHFQSLLYLCSAFISDPSLQTLAIDRGFQIFDRMVSSGISPNESSVTAVARLAAAKGDGDYAFKLVKDIVVVGGVSVPRLRTYAPALLCFCESLEAEKGYEVEEHMDASGIMLEEAEISALLKVSAATGRENKVYRYLHKLRECIGCVSEETSKTIEEWFYGVKASEISDKTIGCDIELLRAAVSKNGGGWHGLGWVGEGKWIVKKGNVSPAGKCLSCGEHLACVDTNEVETENFVNSLVALAMERKAKMNSCEPMADFSEFQEWLEKHGDYEAILDGANIGLYQQNFADGGFSLPQLEAVVKELYNKSGNKKQPLVLLHKKRVNALLGNPNHRNLVEEWIDNNVLYATPPGSNDDWYWLYAAAKLKCLLVTNDEMRDHIFELLSNSFFEKWKERHQVRFTFVKGCLKLEMPPPFSVVIQESEKGSWHIPIKSQDNEESSRSWMCITRQSL

SEQ ID NO: 110 - protein, 567 aa, Brachypodium
MRLAAAAGALRPLFFHPHRQPRRLLSSLRRSSVPLARRRRHSYSSTSTALDDAPNNSPSPTLPGPGPPPAAGGGEGKASRRRRSRDSPEGLLKHKLDMCSRDGDLPTALALYDAALDPASSPPVPLSIHHYNCLLYLCSNAAATASDPDAASRGFEIFARMEAQGVEPNEATLTSVARLAAARRDPAMAFSVVRRMADAGIPPRLRTYGPALFAYCDAGDADGASEVEAHMDAGGVLPEETELAALLRVNADKGRADEVYRVLHRTRVLARQVCETTAQVIEAWFRSDAASQAGVDKWDAKKVKEGVVKGGGGWHGQGWLGKGQWDVERSEMDKNGKCQRCGEKLVCIDIDPSETENFAKSLTELACKREVRDDFLRFQGWLRRHGPFDAVIDAANIGLYNSKAFSFSQVNSVVNGIQRVTKSKKLPLIILHRSRVHCGPAIVPHNQKLIEGWRSAGALYSTPPGSNDDWYWLYAAVSCRSLLVTNDEMRDHLFQLLGTSFFPRWKEKHQVRLTYSGRGPTFHLPPPYSIVTQESEAGRWHVPTTTGDDIENPRQWICAIRKSQRRD

SEQ ID NO: 111 - protein, 729 aa, Brachypodium
MVSLFAPRPLPAHLRRFPAVSLPSVALSYLFSPLPCHARNLLDVLPLRDRNPGGVANGGTPRTEEGAAGSPVVSCTAAQGDVTREVEASVSSGHGRNRTRRWRRGDSRLVLGEGTDRDVKERGWRGGPARTGESEGRRRDRRWTRGGMRVQESGKDGNLGNLSPRGEDRGGNLKRGKRLKSSEQGVMLRVALDLCSKRGDVIGAINLYDSAVKEGIRMGQHHYNVLLYLCSSAALGIVQPAKSGSAGKLDPASVESSGHPEDSNVPEGHVQNQEGNETILFPSVQIGSSIPVSDEIREYARTRGFEIFEKMCSEKERVAMSKAALTGVARMATSMGNGDMAFEIVKQMKELGITPKLRSYGPALTAFCDSGNVEKAFEVEAHMLESGVTPEEPELEMLLRASVVARRGDRVYYLLHKFRNTVRQVSPSTAEQIEAWFRSSTASKVGKRKWDACALAKEIENHGGGWHGLGWLGRGKWTITRSHIDKNGVCLACGGKLAIIDLDPKETEDFATLVATLALKRERTSNFDNFQKWLDDHGPFEAVMDAANVGLFSHRHLSVSKVNAVADAIQKRFPSRKWPLIVVHNRHLTGKHMKNPANHKWVENWKRADIIYETPTGSNDDWYWLYAAIRWKCLIITNDEMRDHTFQLLEKDFFPKWKERHQVRFSFGDSCVTFQMPPPCSVVIQESEKGHWHIPLSEESLLEEERTWLCVMRRSSQALYNEAGVNSDL

SEQ ID NO: 112 - protein, 506 aa, Brachypodium
MATAAAGAAAAGARRRPRRGGSKGPNSDLSRTLTDCTRRGDAAAAMAAFDAAIVSGGPEDLRFAAHQYNQLLHLLASADRSSFPGGHPAVAASARRVFAHMLEATTAAPAEATITSLARVIASDPGGGDEAFELVATMRERYGLAPRLRSYGPVLAAFRRTGEAGKAYAVEAHMAASAVSPEEPELAALLDVSAKAGDADKVYEYMHKLRRAVACVSLETAEVLEGWFQSEKAAMAGKAEWDAQQVKDAIVANGGGCHQLGWLQNGPWVVRRATVGTDGECGGCGCCLASVDIDMEETQTFADSVSGLALERETKANFSHFQEWLEAHQEYEAIVDGANIALYQQNFADGGFSLVQLDAVVTELRDRYSGKWPLVILHNKRIAKLMENPSDRHLIETWRANGALYTSPSGSNDDWYWLYAAIGLNCLLVTNDEMRDHIFELLGSSFFHKWKQRHRVKYTFNKGKAVLLMPPPYSSEIQESETGSWHVPIEEKSGDERVRTWLCIGR

SEQ ID NO: 113 - protein, 552 aa, Physcomitrella patens
MQNAKRPAPNDQQDGDERKSKKKRDPAESELRRSIDMCSKHADAMGAIEIYDKVVAEGKMSFNQYSYNVLLYLCSSGATVVLTDEQKQLCLQRGFAVYEAMKLQGVPPNEATFTAVARLAVAKDDGDLAFDMVKQMAKAKLSPRLRSYSPALHTYCKLKNIEKAFEVDEHMLAAGVQPEESELEALLKLTADAGLEDKVYPLLHRIRTTVRGLSPSTAGVVQQWFESSAGANAGKSNWNSLPSQETVKAAYESRGGGWHGLGWLGRGSWEVKPSELDANGVCQECGEQLVTIDIDPKETVMFAKSLSELACQREGKSNEFKKFQGWLDRHGPFDVIVDGANVGLFNQNFGEGGFNFHQLNSVVKGIKEKVGSKREPLILLHHRRTRGGPASSSFAIKILNKWQETHAIYTTPTGSNDDWYWLFAAVKYKCILVTNDEMRDHLFQLLGNDFFPRWKERHQVRFSLSREGPVFHMPPPYSMLIQESVSGSWHIPKSGGEDVSAPVKWLCVTRTGQPNPEILKVEEKLNHLLAGAGETGPDSKPVEEANSELKQT

SEQ ID NO: 114 - protein, 520 aa, Physcomitrella patens
MAQNGKNHGTPDSSYAKGGKQPRAKNKQYAPEQDLRRALDMCSKHADVKQALEIYDKTCKEGKIAFNQYNYNIILYLCSSAATDSLKPQKKQRILYMKRGFEVYEAMKSQGVPPNEATFTAVARLAVAKEDGDLAFDMVKQMAEANLSPRLRSYAPALYTYCKLKNHKKAFEVDDHMKKSGVALEESELEALLKVSVGAGLEDKVYSLLHRLRTTVRDVSPSAVEVIQQWFTSSAAATAGKSNWEHLPGPEYVKKATESCGGGWHGLGWLGRGTWEVKSSVVDDHGVCQECGEPLATIDLDPQETEMFAQSLSRMACQREAKNNEFKKFQGWLDRHGPFDAIVDGANVGLYNSNTPNGGFNFYQLNSVVTGIQKRLGLKREPLILLHHRRTKGGPADSSFAARMLSNWKENNSIYTTPTGSNDDWYWLYAAVRFRCVLVTNDEMRDHLFSLLGNDFFPKWKERHQVVRYTINREGLVFHMPPPFSTVIQESHKGSWHVPKSGKNDEDVLVPREWLCVTRT

SEQ ID NO: 115 - protein, 526 aa, Physcomitrella patens
MPNAKRAAPYDQQNGDDRNHKKKKDSAESELRRSIDMCSKFADVMGAIEIYDKVVAEGKVAFNQYTYNVLLYLCSSAATEVVVTDEERRLCLERGFVIYEAMKLQEVPPNEATFTAVARLAVAKEDGDLAFDMVKQMANAKLSPRLRSYSPALHIYCKLKNFEKAFEVEEHMLAAGVQAEESELEALLQLATDFGLEYKVYSLLHRIRTTVRGLSPSCAGVVQQWFESSPAASAGKSNWDSLPSPKTVKAAYESRGGGWHGLGWLGRGNWEVKSSVLDTGGVCQECGQQLVTIDIDPNETEMFAKSLSELACQREGKNNEFKKFQAWLNRHGPFDAIVDGANVGLFNQNFVDGGFNFHQLNSVVKGIKEKIGSKRNPLILLHHRRTRGGPANSPHAIKMLKRWQEAHAIFTTPTGSNDDWYWLYAAVQYKCVLVTNDEMRDHLFHLLGNDFFPKWKERHQVRFSMSKEGPVYHMPPPYSILIQESVSGSWHIPKSGNDVSQPGEWLCVTRPGHAKADDMKEEKLKE

SEQ ID NO: 116 - protein, 536 aa, Selaginella moellendorffii
MATESSKPENLSNVKVETFPDVCSQWDQANSARPLYLEIEKRRVEEQERRASSPSPRKKKFNLVSEVRFTLDTCSKFGDVNGALSAYSSNREAVKFDLYNYNVLLYLCSSAALGEMMDGFLRKGLEIFEQMQAENVAPNEATFTALARLSVAKRDGDLAFEIVKAMIAAKIPPKLRCYGPALYVYFKRNDPEKAFEVYNHMLVHGVQPEEAELEVLLHLSSKACLGDRVYLLLHHLRETVRDVSQSTVSVIERWFKSDFAGRVTGNSLPGDFDVRCSSLAKGGGWHGLGWLGQGRWNVGYTSLTAEGVCCRCNEQMVTIDITPEDTDVFAKCIASLAFKRESNNSFGIFKDWLDRNGPFETVVDGANVGFYNQRFNGELNFAQLETVVADVQRRSGKWPLIVLHVGRTMKGSGRSSYAQQLLRHWSNAKALYIAPAGSNDDWYWLYAAVKCKSLLVSNDEMRDHIFQLLGREFFPTWKERHQVRFHVTKHGPVFHMPPPYSIIIQETERGSWHIPVSGGDDISSPRKWLCVTRGST

SEQ ID NO: 117 - protein, 532 aa, Selaginella moellendorffii
MPIASEVLEGDLPLRVNYLQLETKKRAATDNTNHESKRCVQKKKKFTPDSELRFKLESCSKVGDVTGALDIYDSSKDQGVKLSQYHYNVLLYLCSSAALGVILALDRGLEIYERMKLEGISANEAAFTSIARLAVAKRDGDLAFSLVKEMTTSGITPKLRSYGPALYTYFKSNRVDKAFEVDDHMRSFGVQPEEMELQILLELSLKAGQEQRVYSVLHRLRRSVREVSPSTATTIERWFSSDAASSSGSDKKYDDEDVRRALAAQGGGGLELGWIGSGRWSVKRTALDASGVCESCRHKMAAVDLNAEETNRFAENLAALACEKERDANSFKEFQEWMAEHGPFDAIVDGANVALFNQNFSAGGFSFSQLNSVVTELSNQHGKSPLVILHKRRVTGGPAASPQSQELLKQWTAANALYTAATGSNDDWYWLYAAVTCKCLLVSNDEMRDHLFQMLGNDLFPRWKERHQVKLRALSYNPFFDMPPPYSTVIQECENGSWHFPISRGNDEDDEAEEPHKQPRSWLCIRRDEETK

SEQ ID NO: 118 - protein, 213 aa, Brassica napus
MYNRFRVMLGTACFTPSLSRAYCPLFALFLRIPSVHHPHHPSSSPFRGYHSSLQVKGTRDRRRILVDQNRHLCTIPEAAKQPPASTSENLSRKARKKAIQQSPESMLKQKLDMCSRNGNVLEALRLYDEAKRNGLQLSQYHYNVLLYVCSLTDGETESPSANPGLSRGFDIFKQMIVDKVVPNEATFTNGARLAVAKDDPEMAFDMVKQMKAF

SEQ ID NO: 119 - protein, 241 aa, Brassica napus
MAANGQRRSRQDDESPSNPNKKRKANKNPEKNLLFNLNSCSKSKDLSAALALYDAAVASNEVRLNQQHFQTLLYLCSASISDPCLQTLAVERGYQIFDRMVTSGLTLNEATVTSVARLASAKGDGDYAFEIVKDFASLGGTSIPRLRTYAPALLCFCERLEAEKGYEVEEHMEAAGIALEEAEISALLKVSAATSRENKVYRYLHKLRESVGCVCEETSKVVEDWFCGEKAGEVSSDGIGS

SEQ ID NO: 120 - protein, 181 aa, Brassica napus
MATSDHPRSRHHRDESPTKPNKKKKASHNQEKNLLVSLHSCSKSKNLSAALSLYDAAIASGDVRLSQQHFQSLLYLCSASLGDPSLQTLAINHGFQVFERMVSSGISPNEASVTSMARLAAAKGDGDYAFKVVKDIVAVGGVSVPRLRTYAPALLCFCERLEAEKGYEVEEHMEASGIALE

SEQ ID NO: 121 - protein, 489 aa, Artificial Sequence
  mutant Oryza sativa_1
MLAPEGLLKAKLDMCSRDNDLPTALALYEAAISPDSLIPLSLGHYNCLLYLCANAAAADSSSPDAAQRGFDIFSRMEADGVQPNEATLTILARLAAARRDPAMAFSIVRRMATAGTAPHLRSYGPALFAYCDAGDADGATEVEAHMDASGVVPEEAELAALLRVNSARGRPDQVYRLLHRARVLLRQVADATAQLLESWFASHAASEAGLDHWDATKVKQGLRNGGGGWHGQGWLGKGQWTVARTDMDKDGTCHRCGEKLVCIDIDPSETHSFAESVAQIAINRDANFVKFQKWLECHGPFDAVIDAANVGLYNRNSFSFYEVNRVVNGIQRITKSKKLPLIILHKNRVNGGPAKLPQNQKLLESWQRAGALYATPPGSNDDWYWLYAAVIYRSLLVTNDEMRDHLFQLLGTSFFPRWKENHQVRLTFSGRGWNFHLPPPYSIVIQESEDGSWHVPTTNGDDIEKPRQWICATRKISGKSSQALARAVG

SEQ ID NO: 122 - protein, 548 aa, Artificial Sequence
  mutant Oryza sativa _2
MGGENEVKLRVELDMCSKRGDVIGAINLYDSAVKEGIKMGQHHYSVLLYLCSSAALGFVQPAKSGNAGSGIASIGQLHSSSTQSVGNLEGDDVQSEGHSEDQEGNKTDLFASDDGTEKPSRIPVSDELREYARTRGFEIFEKMRSEEEKVPMNESALTAVARMAMSMGNGDMAFDVVKQMKDQGIAPKLRSYGPALTAFCNSGNVEKAFEVEAHMLESGVRPEEPELETLLKASVAAQQGDKVYYLLHKFRTTVRQASSTTAKLLEDWFQSPTASKVGKRKWDSGAITKAIENNGGGWHGLGWLGRGKWTISHSHIDRNGACLACGEKLTIIDLDPKETEDFATLVAKLAIKRERRSNFDNFQKWLEKHGPFDAVVDGANVGLFSHKHISLSKINIVADVIRQRFQSRKLPLIVVHNRHLTGERMQKPSNRKLVEKWKLSNAIYATPTGSNDDWYWLYAAIRCKCLMVTNDEMRDHTFQLLERDFFPKWKERHQVRFNFEDSCVTLQMPPPCSVVIQESENGQWHIPVVSEEGSLEKDRTWLCVTRRN

SEQ ID NO: 123 - protein, 526 aa, Artificial Sequence
  mutant Oryza sativa _3
MGSKGPNSDLSRTLTDCTRRGDAAAAMAAFDSALSGPDAPRLLAHQYNQLFHLLATADADSLPNAAAAARRVFSHMLGSGASPSEATITSLARVTASDASNPAAADEAFDLVATMRDKYGVAPRLRSYSPVLAAFRRAGEAGKAYAVDAHMEASAVAPEEPEIAALLDVSAKAGDADKVYEYMHKLSRTVDCVGEETAEVLEGWFRSGKAAMAGKAEWDACKVKDAIVANGGGCHRLGWLGTGPWTVQRVRVGGDGQCEGCGCRLACVDIDVEETQRFADSVASLALQRETKINFSQFQEWLEEHGAYEAIVDGANIALYQQNFAEGGFSLTQLDAVVTELRDRYNGKWPLVVLHNKRIAKLMENASNRHLIETWRANGALYTSPIGSNDDWYWLYAAIRLNCLLVTNDEMRDHIFELLGSSFFPKWKQRHQVKYTFSKGKAVLMMPPPYSSEIQESEMGSWHVPMEEKSGDDRARIWLCIDRTGHCKHPHEAPAANGVVQDVSPTEASHGCEQRRAEHNGGSLTG

SEQ ID NO: 124 - protein, 483 aa, Artificial Sequence
  mutant Zea mays_1
MESPQGLLRHQLDMCSRNADLTTALRLYDDALSPDNPIPLSLHHYNCLLYLCSNAAATDSDSHISATAAQRGFDIFARMEADGVQPNEATLTSVARLAAATRDPAMAFSVVRRMAAAGTPPRLRTYGPALFAYCDAKDADGAKQVEAHMDASGVVPEEPELAALLRVNADTGKADEVYRLLHRTRVLVRQVCDTTAQVVEAWFRSDAASQAGVDSWDPTKVKEGVVKGGGGWHGQGWLGKGAWSVGWTEMGKDGTCQRCGERLVCIDIDPAETDNFANSLTELAIKLEAREDFLSFQSWLRRHGPFDAVIDAANVGLYKSKDFCFSQVNSVVNAIQRVTKSKKLPLIVLHRSRVNVGPAKAPYNQKILDSWRNAGALYATPPGSNDDWYWLYAAVSCRSLLVTNDEMRDHLFQLLGTSFFPRWKEKHQVRLTFSGHGPTLHLPPPYSIVIQESEDGSWHVPTTTGDDIEKPRQWLCTTRKSLR

SEQ ID NO: 125 - protein, 554 aa, Artificial Sequence
  mutant Zea mays _2
MDGEYAGKLRVELDMCSKRGDVMGAITLYDSAVEEGIKLGQHHYNVLLYLCSSASLGFVQPAKSGNMGSGIASIGPAQKLDPSPSRSLGGSEGDNAYASESHVQDQGKNKADLIPGGLKAQTVSIPVEDELGDYARARGFEIFDKMCSEKERVQMSEAALTAKARMALSMGDSDMAFEIVKQMKGLGLKPKLRSYGPALTAFCNSGNVEKAFEVEAHMLESGITPEEAELETLLRASVVGRRGDKVYYLLHKFRTAVRQVSHSTAELFEAWFRSPTASKVGKRKWDAGAIAKAIENNGGGWHGFGWLGRGKWTVAHSNINENGVCLACGEKLAIIDLDPKETEDFATFVAKLAIKRERKSNFENFQKWLEKHGPFEAVVDAANVGLFSHKHLSLSKVNSVADAIRLRFTSKKWPLIVLHNKHLIGERMKKLNDHKLVQKWKQENSIYATPTGSNDDWYWLYAAIRCKCLIITNDEMRDHTFQILERNFFPKWKERHQVHFTLEDRCVTFQMPPPYSVVIQESDKGHWHIPVSEEGLLEKDRTWLCVTRQNSQAQ

SEQ ID NO: 126 - protein, 503 aa, Artificial Sequence
  mutant Zea mays _3
MGSKGPNADLSRTLTDCTRLSAHQYNQLLHLLAATDRSSFPSPPAAAARRVFAHMLQAAAPPSEATITSLARVIAADPASAADEAFELVATMKDKYGLSPRLRSYGPVLAAFRRAGEAAKAYAVEAHMTASGVSPEEPELAALLDVSSRAGDADKVYEYMHKLRQAVHCVSEETAGVVEAWFRSDEAATAGKPQWDAAQVKDAIVANGGGCHRLGWLGTGPWTVQRVRVGDADQCGGCRFHLACIDIDMEETQRFADSVAGLALERETKTNFSRFQEWLEANKDYQAIVDGANIALYQQNFAEGGFSLTQLDGVITELRDRYHGKWPLVILHNKRISKLMENSSNRHLIETWRTNGALYTSPSGSNDDWYWLYAAIKLNCLLVTNDEMRDHIFELLGPSFFPKWKQRHRVKYTFNKGKAVLVMPPPYSSELQESEMGSWHIPIEEKSGNERGRIWLCIGRGGSCKEHGEVPSTNGAVHKVPQTEASNVVQQGLTENKDESITG

SEQ ID NO: 127 - protein, 663 aa, Artificial Sequence
  mutant Triticum turgidum 1
MESPAGILRHRLGICSRDADLATALELYADAVDPATAVPLALHHYNCLLYLCSNAAAEDADAARRGFEIFAAMEAQGVEPNEATLTSLARLAAAVRDPAMAFSVVRRMAAAGIPPRLRSYGPALFAYCDARDAHGAAEVEAHMDAGGVVPEETELAALLRVNADTGRADQVYRVLHRTRTLVRQVCEATAQVVEAWFQSDAAAEAGVEKWDARKVREGVVKGGGGWHGQGWLGKGQWDVGQSEMDKNGKCQRCGEKLVCIDIDPSETETFAKSLAELACKREVRDDFVRFQDWLRRNGPFDAVIDAANVGLYNSKAFSFSQVNSVVNGIQRVTKSKKLPLIVLHRSRVNCGPAKAPQNQKLIESWRNAGALYSTPPGSNDDWYWLYAAVSCRSLLVTNDEMRDHLFQLLGTSFFPRWKEKHQVRLTYSGRGPTFHLPPPYSIVIQESETGSWHVPTTTGDDIESPRQWVCATRKTSEGPPSPPPQARVSSKTSERLPSPPPQACATRKTSERPPSPPPQARATRKTSEGPPSPPPQARATSKTSERLPSPQPQARATSKTSERPPSLQPQARATSKTSERPPSPPPQARSTRKTSERPPSPPPQAHGTRKTSERPSSPPSQASATSKTTEGPSSPPSQASATIKTSEGPSSPPPQARLSDLGW

SEQ ID NO: 128 - protein, 531 aa, Artificial Sequence
  mutant Triticum turgidum 3
MGLGGKGPNSDLSRTLTDCTRRGDAAAAMAAFDAALSGPDAAPGLRLAAHQYNQLLHLLASADRAAFPARPAAAARRVFAHMLGAGAPPSEATITSLARVVAADDAEGADEAFGLVSTMREKYGLAPRLRSYSPVLAAFRRAGEAGKAYEVEAHMAASAVSPEEPEIAALLEVSAKAGDADKVYEYMHKLRRAVGCVKEETAEVLEGWFESEKAAAAGKAEWDVCQVKDAIVANGGGCHQLGWLRTGPWTVQRVRVGADGECSGCGCRLASVDINMEDTQKFADSISGLALERETKANFSQFQEWLEAHKEYEAIVDGANIALYQQNFAEGGFSLVQLDAVVTELRDRYSGKWPLVILHNKRIAKLMENSSNRHLIETWRANGALYTSPSGSNDDWYWLYAAIGLNCFLVTNDEMRDHIFELLGSSSFFYKWKQRHRVKYTFNKGKAVLVLPPPYSSEIQESETGSWHVPIEEKSGDERARTWLCIGRTDLSKPPREPPVANGVAQDLSPSEASNGAGQRQPEEQAAPVTG

SEQ ID NO: 129 - protein, 481 aa, Artificial Sequence
  mutant Solanum lycopersicum_1
MDAPESVLRHQLDQCSKRGDLQEAIRLYEEAKLNNITLNVHHYNVLLYLCSSGSGTEGCGIEKGFLIFKQMGVNGVAPNEATFTSAARLAVAKQDPEMAFDLVKKMKSFGVPPKLRSYGPALFGFCEKGMADKAYEVDVHMGESGVVAEEAELSALLKVSSFSKKADKVYEMMHRLRASVRQVCEETVGVVEDWFNSEYAAEVGLQDWDARKVKEGVVKGGGGWHGQGWLGKGNWTVVRAEMDSSGVCRSCGEKLVCIDIDPKETENFANSLAELASEREVKANFVQFQDWLQKHGPFDAVVDGANVGLITQRNFNFSQLRSVVNKLRQMSESKKLPLVILHKSRTTGGPAQHPNNKKLLESWKKAGALYATPHGSNDDWYWLYAAVSSKGLLLTNDEMRDHLFQLLGTSFFPRWKEKHQIRMTASRDDGLKLHMPPPYSIVIQESEQGCWHIPTLTGDDLEIPRQWVCATRKKALHSVFR

SEQ ID NO: 130 - protein, 645 aa, Artificial Sequence
  mutant Solanum lycopersicum _2
MIDSTLRIGLDMCSKRGDVLSAIKLYDLALLQGIVMGQYHYAVLLYLCASAATGLIHPAKSGSVNRTLNAPNEQEFSLNDKVIEHDSHLLSSSTVDEFVQFMKSSAKSVRHDDNGIKVSEDVRHYALTRGFEIYEKMLSDKVQINEATLTSVARMAMALGNGDMAFDVVKKMKEDGINPKLRSYAPALSVFCNNGDVDKAFIVEQHMLENGIYPEELELEALLKVSIEAERSEKVYYLLHKLREGVRQVSPSTADLIDKWFNSKVASRVGKRKWDVRSIHKAIKNGGGGWHGQGWLGNGKWTVSHGIVGSDGCCKCCAEKLVTIDLDPEETEKFAKSVASIAAQRERNSSFQKFQRWLDYYGPFEAVIDGANVGLYSQRKFRPSKVNAVVNGIRQMLPSKKWPLIVLHNRRITGDKMDEPFNRSLVEKWKNADAIYATPTGSNDDWYWLYAAIKFRCLLVTNDEMRDHLFQLLGNDFFPKWKERHQVRFSFSETGPVFHMPPPCSIVIQESEEGNWHVPIASELESEEERTWLCIRRANSPMAHQDSSRVNISKNVGGPTHKCPPTSSDSPHNKGDAKSSTRRKNQVKVTGKTRGSHCRGKDAPEEMYRSLKNILQPSITSDHCSILPELKAAEELGRCVVDFQI

SEQ ID NO: 131 - protein, 544 aa, Artificial Sequence
  mutant Solanum lycopersicum _3
MNLTPEGQFRSSLDNCSKTKDLSTAISLYESAISDASTIRLSSNHFNSFLYICSNSFSDPSTKNDAIQFGFRVFEHMDSCNITPNEATVTAVARLAAATDDGDRAFELAKGVGNCGKLRTYGPALFCFCKMGEADKAYQVEEHMRSLGLQLEEAELAGLLKVSVEKEREEKVYQYLHKLRMSIRSVSDSTAEIIQSWFGGEMATKVGLSNGDMDQVKEVILQNGGGWHGLGWLGKGKWLAQRSQIAPDGRCLSCGEQLVCVDIDRSETERFAESVASLAMEREVHSNFKEFQDWLEKHSDYDAVVDAANVGLFQQNFAAGGFSIAQFVAVVKELHSRSNKWPLVILHKKRVRTLLEDAGYRELLEEWINEKILYGTPFGSNDDWYWLYAAVKCKCLLVTNDEMRDHIFELLGSSFFARWKERHQVKYTFVKGEIKLLMPPTYSVVIQESENGSWHVPLAGEVVEESSRTWLCITRQASCESDNKQLASVVEASEVSEPDQIAACCHSDSFTSQNGGSLNKCSGLAGKRKERSPSPTPSHSSLQS

SEQ ID NO: 132 - protein, 484 aa, Artificial Sequence
  mutant Brassica rapa 1
MAIQQSPESMLKQKLDMCSRNGNVLEALRLYDEAKRNGLQLSQYHYNVLLYVCSLTDGEAESPSANPGLSRGFDIFKQMIVDKVVPNEATFTNGARLAVAKDDPEMAFDMVKQMKAFGIQPRLRSYGPALFGFCRKGDAEKAYEVDAHMIESEVVPEEPELTALLKVSMETKNAEKVYETLQRLRDLVRQVSKPTFDAIEEWFESEAAGKAGVEKWDVKRIREGVVSGGGGWHGQGWLGTGKWNVTRTEMDENGVCKCCKEKLVCIDINPVETENFAASLTRLACQKEVKASFNQFQEWLERHGPFDAVIDGANMGLVNQRSFSFFQLNNVVQRFQQISPSKRLPLVILHKSRVVGGPATYPKNRALLEKWKNAGALYATPPGSNDDWYWLYAAVSCKCLLVTNDEMRDHLFQLLGTSFFPRWKEKHQVRISVSREDGLKLHMPPPYSIIIQESEDGRWHVPMSVEDDLQTSRQWLCARRSKTH

SEQ ID NO: 133 - protein, 512 aa, Artificial Sequence
  mutant Brassica rapa 3a
MANKNPEKNLLFNLNSCSKSKDLSAALALYDAAVASNEVRLNQQHFQTLLYLCSASISDPCLQTLAVERGYQIFDRMVTSGLTFNEATVTSVARLASAKGDGDYAFEIVKDFASVGGTSIPRLRTYAPALLCFCERLEAEKGYEVEEHMEAAGIALEEAEISALLKASAATSRENKVYRYLHKLRESVGCVCEETSKVIEDWFCGEKAGEVSSDGIGSDVEMLREAVLRNGGGWHGRGWVGEGKWIVKKDNVSSTGRCLSCNEQLACVDTNEVETQKFVDSLVALAMERKAKMISSETKVDFSEFQDWLEKHGDYEAIVDGANIGLYQQNFADGGFSLSQLEGVVNELYHKSGDKKWPLILLHKKRVRTLLENPTHRNLVDEWINNGVLYATPPGFNDDWYWLYAAAKLKCLLVTNDEMRDHIFELLSNSFFQKWKERHQVRYTFTKGNLKLEMPPPFSVVIQESEKGSWHVPVASQNNESSRTWMCISRRSVLDSLMINGKLETSENGDSS

SEQ ID NO: 134 - protein, 491 aa, Artificial Sequence
  mutant Brassica rapa 3b
MASHNQEKNLLVSLHSCSKSKNLSAALSLYDAAIASGDVRLSQQHFQSLLYLCSASLGDPSLQTLAIDRGFQVFERMVGSGISPNEASVTSMARLAAAKGDGDYAFKVVKDIVAVGGVSVPRLRTYAPALLCYCERLEAEKGYEVEEHMEASGIVLEEVEISALLKVSAATGRENKVYRYLHKLREYVGFVSEETSKVIEEWFCSEKASEVVRIGSDVELLRAAALKNGGGWHGLGWVGEGKWVVKKGNVSADGECLSCGEHLACVDTNEVETENFVNSLVALAVERKAKMNSSEPMEDFSEFQEWLEKHGDYEAILDGANIGLYQQNFADGGFSLPQLEAVVKELYSKSGNKKWPLILLHKKRVNALLENPNHRNVVEEWISNDVLYTTPPGSNDDWYWLYAAAKFKCLLVTNDEMRDHIFELLSTSFFQKWKLRHQVRYTFVKGSLKLEMPPPFSVVIQESEKGSWHVPITCKDGEESLRNWMCVTRQS

SEQ ID NO: 135 - protein, 483 aa, Artificial Sequence
  mutant Carica papaya 1
MARRESPEGVLRYKLDMCSKHGDLVEALHLYDEARREGVQLSQYHYNVILYLCSSGGSSVEVSGDWDGEKDSVLGLKRGFDIFGQMVADKVAPNEATFTSIARLAVAMDDPDKAFDLVKQMTSFGIPPKLRSYGPALFGFCKKGKVDNAYEVDAHMVEAGVMAEEPELSALLKVSADGKKADKVYEMLQRLRATVRQVSESTAEIVEDWFKSDDAATVGVDNWDENLVKEGIVKGGGGWHGQGWLGTGKWNVVRTQMNEKGVCRSCGEKLGCIDINPTETENFATSLTNLACQREVRADFTCFQEWLETHGPFDAVIDGANVGLINQHTLSFNQLNNVVNQLREMSPSKRLPLVILHKSRATGGPAQKPKNKYLLESWKKSGALYATPPGSNDDWYWLYASVSCKCLLVTNDEMRDHLFQLLGTSFFPRWKEKHQIRLSVSRNGLKLHMPPPYSIVIQESENGSWHVPTTTRQWLCATRTRLR

SEQ ID NO: 136 - protein, 700 aa, Artificial Sequence
  mutant Carica papaya 2
MADSPGFKLRVELDMCSKRGDVTSAIQLYDKALKEEIKLEQYHYSVILYLCSSAAAGVVQPAKSGSISRTLNTLSLSNESYRVNAIELGESMDRSNGNASHTELNINFSNNEQLVGTDGGHFEDIDKMASSGVRFENLGNNCKEEENLIQFPNGSMKPNSQLWGKMGIGDHSNQKHMSGITQDHEILVTEDIKKYALHRGFEIYKKMRLDGVPMNEAILTAVARMAVSTGNGDMAFDMVKLMESLGITPRLRSYSPALSAFCTSGDIDKAFAVEKHMLAHGIHPEEHEIEALLKLSVEAGKGDKVYYLLHKLRTTVRKVLPSTADIIVKWFESEVASRVGKKKWDARLIKEAIENGGGGWHGQGWLGEGKWVVSRTVIGRDAFCKCCGEKLAMIDLDPLETENFAQSVASIARKREKNRSFQKFQKWLDYYGPYEAVIDAANVGLFSQKKFKPSKVNAIVNGMRQMLPSRKWPLIVLHNKRITGPKMNEPANKTLFDKWKNADALYATPTGSNDDWYWLYAAIKFKCLIVTNDEMRDHTFQLLGNDFFPRWKERHQVHFSFSDAGPVFHMPPPYSVVIQESEKGHWHIPIAAEHDYEAERIWLCIARSQSGKMRQTLPAAHQVDLQSLERHLGPSTPTDFNIKSNRSSASMAENGSKETREMYQNLKNILTGPMISNNCSVLSELEAAEKIGDCVIDFQI

SEQ ID NO: 137 - protein, 491 aa, Artificial Sequence
  mutant Carica papaya 3
MNRNPEIDLLVNLQSCSKSKDLTTAISLYDSGISQNIRINQHHFSILLYICAASVTDPSSKSLAIERGFRIFDHMVSSGMSSNEASITSVARLAAAKGDGDYAFALIKDLVANGGLPRLRTYSPALLYFCENLEDGKAYEVEEHMDRMNVSLEEAEMAALLKVSAEVGKEERVYRYLHKLRGSVRCVSKETAKIIENWFSGEKGSAVGNGVEYSATEIREAVSKTGGGWHGLGWLAGRGKWVVRRANVEETGRCCCCGEQLACVDIDEIETEKFANSVAALAMEREAKLNFSDFQDWVEKHAPYEAIVDGANIGLYRQNFADGGFSIPQLDAVVKEMYCRSGNKWPLVILHDKRLRGLLENPSCRKVVEEWMDNGVVYKTPHGSNDDWYWLYAAVKLRCLLVTNDEMRDHIFELLGSSFFLKWKERHQVRYTFPKGSLKLQMPSPYSLAIQESENGSWHVPIASDSSLEYGKSWLCITRPSACASEVQVKS

SEQ ID NO: 138 - protein, 488 aa, Artificial Sequence
  mutant Solanum tuberosum 1
MDAPESVLRHQLDQCSKRGDLQEAIRLYEEAKLNNITLNVHHYNVLLYLCSSGSGTEGCGIEKGFQIFKQMGVNGVAPNEATFTSAARLAVAKQDPEMAFDLVKKMKSFGVPPKLRSYGPALFGFCEKGMADKAYEVDVHMGESGVVAEEAELSALLKVSSFSKKADKVYEMMHRLRGSVRQVCEETAGVVEDWFNSEFAAEVGLQDWDVRKVKEGVVKGGGGWHGQGWLGKGNWTVVRAEMDSSGACRSCGEKLVCIDIDPKETENFANSLVKLACEREVKANFVQFQDWLQKHGPFDAVVDGANVGLITQRNFNFSQLRSVVNKLRQMSESKKLPLVILHKSRTTGGPAQHPNNKKLLESWKKAGALYATPHGSNDDWYWLYAAVSSKGLLLTNDEMRDHLFQLLGTSFFPRWKEKHQIRMTASRDDGLKLHMPPPYSIVIQESEQGCWHVPTLTGDDLEIPRQWVCATRKKALHSLFRRNGESNH

SEQ ID NO: 139 - protein, 624 aa, Artificial Sequence
  mutant Solanum tuberosum 2
MIDSTLRIGLDMCSKRGDVLSAIRLYDLALLQGIVMGQYHYAVLLYLCASAATGLIHPAKSGSGSRTLNAPNEPSSHNNSNEFNVIDHDSHLLGSSTVDEFVQFMKSSAKRCNLQSVRHDDSGIKVSEDVRHYALTRGFEIYEKMLSDKVQMNEATLTSVARMAMALGNGDMAFHVVKKMKEDGINPKLRSYGPSLSVFCNNGDVDKAFIVEQHMLENGIYPEEPELEALLKVSIEAGRSEKVYYLLHKLREGIRQVSPSTADLIAKWFNSKVASRVGKRKWDVRSIHKAIKNGGGGWHGQGWLGNGKWTVSRAIVGSDGCCKFCAEKLVTIDLDPEETEKFAKSVASIAAKRERNSSFQKFQRWLDYYGPFEAVIDGANVGLYSQRKFRPSKVNAVVNGIRQMLPSKKWPLIVLHNRRITGDKMDEPFNRSLVEKWKNADAIYATPTGSNDDWYWLYAAIKFRCLLVTNDEMRDHLFQLLGNDFFPKWKERHQVRFSFSETGPVFHMPPPCSIVIQESEEGYWHVPIASELESEEERTWLCIRRANSPMANQDSSTVNISKNVGDPTHKCPPTSSDPPHNQGDARSSTRRKNQVKVTGKTHGSHGRELKAAEELGSCVVDFQI

SEQ ID NO: 140 - protein, 543 aa, Artificial Sequence
  mutant Solanum tuberosum 3
MNLTPEGQFRLSLDNCSKTKDLSTAISLYESAISEPSTIRLSNNHFNSFLYICSNSFSDPSTKNDAIQFGFRVFEHMGSCNITPNEATVTAVARLAAATDDGDRAFELAKGVGSCGKLRTYGPALFCFCKMGEADKTYQVEEHMRSLGLQLEEAELAGLLKVSVEKEREEKVYQYLHKLRMSIRSVSDSTAEIIQSWFGGEMASKVGLSNWDMDQVKQAILQNGGGWHGLGWLGKGKWLAQRSQIAPDGRCLTCGEQLVCVDIDRAETERFAESVASLAMEREVHSNFKEFQDWLENSDYDAVVDAANVGLFQQNFAEGGFSIAQLVAVVKELHSRSNKWPLVILHKKRVRTLLENAGYRELLEEWINEKILYGTPFGSNDDWYWLYAAVKRKCLLVTNDEMRDHIFELLGSSFFARWKERHQVKYTFVKGEIKLLMPPTYSVVIQESKIGSWHVPLAGEVVEESSRTWLCITRQASCESDNKQHASVVEASQVSELNQIAASCHSGSFTSQNGGSLNKCSGLAGKRKERSPSPTPSHSSLQS

SEQ ID NO: 141 - protein, 452 aa, Artificial Sequence
  mutant Nicotiana tabacum 1
MDAPESVLRHKLDQCSKHGDLQEALRLYEEAKLNNISLNVHHYNVLLYLCSASCTKEFGIEKGFEIFKQMGVNGVTPNEATFTSAARLALAKQDPKMAFDIVKKMKSCGVPPKLRSYGPALFGFCDKGMADNAYEVDIHMGESGVVAEEAELSALEDWFNSECAAEIGVENWDVGKVKEGVVKGGGGSHGQGWLGKGNWSVVRAEMDSSGVCSSCGEKLVCIDIDPKETENFANSLAKLACEREVKANFVQFQEWLQKHGPFDAVVDGANVGLITQRSFNFSQLRNVVNKLRQMSKSNKLPLVILHKSRATGGPAQHPNNKKLLESWKKAGALYATPHGSNDDWYWLYAAVSSKGLLLTNDEMRDHLFQLLGTSFFPRWKEKHQIRMTASRDDGLELHMPPPYSIVIQESEHGCWHVPTVIGDDIEMPRQWVCATRRKALHSLFQPTGESNH

SEQ ID NO: 142 - protein, 421 aa, Artificial Sequence
  mutant Nicotiana tabacum 2
  misc_feature (88)..(88): Xaa can be any naturally occurring amino acid
MIDSTFKIGLDMCSKRGDVVGAIRLYELALQEGIAMGPYHYAVLLYLCASAATGVVQPAKSGSGSNRTLNSLDLPKGSTSVKIKASSXGKVTNLTNMLSFSSDTNCQTLDELVQLFESRAEASNTISDHGIKVSEDVKHYALKYGFEIYEKMRSEKVQMNEATLTSVARMAMALGNGNMAFDVVRLIKEYGINPRLRSYGPALSVFCNNGDVDKAFMVEEHMLEHGVYPEEPELEALLKVSVEAGRSEKVYYLLHKLREGVRQVSPSTADLIEKWFNQAGVQGVGKRKWDERTYAKLFKTGGGGWHGQGLVGDDWYWLYAAIKFKCLIVTNDEMRDHLFQLLGNDFFPKWKERHQVHFSFSETGPVLHMPPPCSVVIQESEKGYWHVPIVSQQGSEEERTWLCIRRANSPLAKQESSSVDI

SEQ ID NO: 143 - protein, 527 aa, Artificial Sequence
  mutant Nicotiana tabacum 3
MNLTPEVQFRLSLDNCSKTKDLSTAISLYESALSTIRFSNNHFNSFLYICSNAVSDPSTKNPAIEFGFRIFDHMVSSNVTPNEATVTAVARLAAATDDGDKAFELAKGVGNCGKLRTYGPALFCYCKMGEADKAYQVEDHMRSIGLQLEEAELVGLLKASVVKEREEKVYQYLHKLRMSVRSVSASAAEIIQSWFGGEMAAKLGLSDWDMGQVKEAILQNGGGWHGRGWLGKGKWIVQRSQIAPDGRCLTCREQLVCVDIDKAETERFAEAVASLAMEREVHSNFKEFQDWLEQHSEYDAVVDAANVGLYQQNFAEGGFSIAQLVTVVTRIAHKWHWCIHKSVFVHSENAYIESCLRVINEKVLYGTPFGSNDDWYWLYAAVKRKCLLVTNDEMRDHIFELLGSSFFAIWKERHQVKYTFVKGEPKLLMPPTYSVVIQESENGSWHVPLAGEVAEESSRSWLCMSRHDKQHTSVEAAEVSELVCSDQIEDSCHSDSFASQNGLNTCSGLAGKRKERSPSPSHSSLQS

SEQ ID NO: 144 - protein, 518 aa, Artificial Sequence
  mutant Setaria_1
MHSYSSTATVADPTPTLEDSGGARGEAEGKAARRRRARESPEGLLRHQLDMCSRNADLTTALRLYDAALSPDSPVPLSLHHYNCLLYLCSNAAASDPESSAAAAQRGFDIFARMEADGVQPNEATLTSVARLAAATRDPAMAFSVVRRMAAAGTPPRLRTYGPALFAYCDAKDADGAGQVEAHMDASGVVPEEPELAALLRVNADKGRADEVYRLLHRTRALVRQVCDTTAQVVEAWFRSDAASEAGVDKWDPSQVREGVVKGGGGWHGQGWLGKGQWSVGRSEMDKEGTCQRCGERLVCIDIDPSETDNFANSLTELAIKREVREDFLGFQRWLRRHGPFDAVIDAANVGLYNSKAFSFSQVNSVANAIQRVTKSKKLPLIILHRSRVNGGPAKAPFNQKILEGWRNAGALYATPPGSNDDWYWLYAAVSCRSLLVTNDEMRDHLFQLLGTGFFPRWKEKHQVRLTFSGRGPTLHLPPPYSIVIQESEDGTWHVPTTTGDDIEKPRQWICSTRKSFK

SEQ ID NO: 145 - protein, 692 aa, Artificial Sequence
  mutant Setaria_2
MAREVLDVMPRRDGGRPPRTEEGRTGSAGVRHGANGGTVRGDTTSREAGTPLQREGSRGVPRPWKKGDRVVGEERLDWESQEKNWRRGPIRTGEQEWQRDGKRWTRGGNGMWEKESGNSGNSRDVDRGSRNVTKKKMRVKGGEQGGKLRVLLDMCSKRGDVMRAISLFDSAIEDGIRLGQHHYNVLLYLCSSAALGFVQPAKSGNTASGITSIGPAQKLDSSPSGSLGGSEVDDASEGLVQDQEKEKAEMLPSGDLTVQTITIPVGDELREYARARGFEIFEKMCAEKERVQMSEAALTAKARMALSMGDGDMAFEVVKQMKDLGITPKLRSYGPALTAFCNSGNVEKAFEVEAHMLECGITPEEAELKMLLRVSVVGRRGDKVYYLLHKFRAAVRQVSLSTAQLFEAWFRSPTASKVGKRKWDAGVISKAIENNGGGWHGFGWLGRGKWTVTRSHINKNGACLACGEKLTIIDLDPKETEDFATFVSKLAIKRERNSNFEKFQKWLEKHGPFEAVVDAANVGLFSHKHLSLNKVNAVADAIRQRFASRKWPLIVLHNRHLTGERMKKPGNHKLVEKWKQANSIYATPNGSNDDWYWLYAAIRCKCLIITNDEMRDHTFQILEKDFFPKWKERHQVHFTYDESSVTFRMPPPYSVVIQESEKGHLHIPISEEGLLEKDRTWLCVTRRNSQER

SEQ ID NO: 146 - protein, 493 aa, Artificial Sequence
  mutant Setaria_3
MAAHQYNQLLHLLATADRSSFPSAAAAARRVFAHMLQAGAPPSEATITSLARVTAAPDADNPASAADEAFELVATMREKHGLAPRLRSYSPVLAAFRRAGDASKAYAVEAHMAASGVSPEEPELAALLDISSTAGDADKVYEYMHKLRQTVDCVTEETAQVVEGWFSSDNAGVAGKAEWDAAQVKDAIVLNGGGCHRLGWLGTGPWTVQRVRAGADCQCAGCKCQLACVDIDMEETQRFADAVAALALERETKANFSQFQEWLEENKEYEAIVDGANIALYQQNFAEGGFSLTQLDAVITELRGRYHGKWPLVILHNKRIAKLMENSSNRHLIETWRANGALYTTPSGSNDDWYWLYAAIKLNCLLVTNDEMRDHIFELLGSSFFPKWKHRHRVKYTFNKGKAVLVMPPPYSSEIQESEVGSWHVPLEEKSGDERVRIWLCIGRTGTCKEPDEVPTTNGVVQEVPPNEESNGVQQSLQEDKAESITGKRKDRD

SEQ ID NO: 147 - protein, 505 aa, Artificial Sequence
  mutant Sorghum bicolor_1
MPALEDSSPSNGEGKAARRRRARESPEGLLRHQLDMCSRNADLTTALRLYDDALSPDTPVPLSLHHYNCLLYLCSNAAATDTDTDSSTAAAQRGFDIFARMEADGVQPNEATLTSVARLAAATRDPAMAFSVVRRMAAAGTPPRLRSYGPALFAYCDAKDADGAKQVEAHMDASGVVPEEPELAALLRVNADKGKADEVYRLLHRTRALVRQVCDTTAQVVEAWFRSDAASQAGVDKWDPSKVKEGVVKGGGGWHGQGWLGKGAWSVGWTEMDKDGTCQRCGEKLVCIDIDPSETDNFANSLTELAIKREVKEDFLGFQNWLRRHGPFDAVIDAANVGLYNSKAFSFSQVNSVVNAIQRVTKSKKLPLIILHRNRVNGGPAKAPYNQKILESWRNAGALYATPPGSNDDWYWLYAAVSCRSLLVTNDEMRDHLFQLLGTSFFPRWKEKHQVRLTFSGRGPTLHLPPPYSIVIQESEDGSWHVPTTTGDDIEKPRQWMCTTRKSSK

SEQ ID NO: 148 - protein, 643 aa, Artificial Sequence
  mutant Sorghum bicolor _2
MAYLSTTRFIPVYHRCIFFSASSSPPIVTRRCPVPTLSCHGRDVLDVMPNRDSRIPGTEESRAGPAGPPRGTNGPTVREDATAQEARTPLWREGSRGAPRTWRKGDRVVLQERVEWVSQERSWRRGLTRSLGSEGPRAGKRWTREGNGMRAKESGKVGNSRDEGTGGGEYAGKLRVELDMCSKRGDVMGAIALYDSAVEEGVRLGQHHYNVLLYLCSSASLGDDLREYACARGFEIFEKMCSEKERVQMSEAALTAKARMALSMGDSDMAFEIVKQMKDLGLKPKLRSYGPALTAFCNGGNVEKAFEVEAHMLESGITPEEAELETLLRASVVGRRGDKVYYLMHKFRTTVRQVSPSTAELFEVWFRSPTASKVGKRKWDTGAIVKAIENNGGGWHGFGWLGRGKWTVTRSNINKNGVCLACGEKLAIIDLDPKETEDFATFVAKLAIKRERNSNFENFQKWLKKHGPFEAVVDAANVGLFGHRHLSLSKACILLRFTSRKWPLIVLHNKHLTGEHMKKPGNHKLVEKWKQANSIYATPTGSNDDWYWLYAAIRCNCLIVTNDEMRDHTFQILERNFFPKWKERHQVHFTIEDSCVTFQMPPPYSVVIQESDKGHWHIPVSEEALLEKDRTWLCVTRQNSQAQ

SEQ ID NO: 149 - protein, 461 aa, Artificial Sequence
  mutant Sorghum bicolor _3a
MHMLQAGAPPSEATITSLARVIAAADDPGSSAADEAFELVATMKDKYGLSPRLRSYGPVLAAFRSAGEAAKAYAVEAHMTASGVSPEEPELAALLDVSSRAGDADKVYEYMHKLRQAVDCVSEETAGVVEAWFRSDKAAMAGKSEWNAAQVKDAIVANGGGCHRLGWLGTGPWTMQRVRVGADDQCAGCRYRLACIDIDMEETRKFADSVAGLALERETKTNFSRFQEWLEANKEYQAIVDGANIALYQQNFAEGGFSLTQQLDAVITELRDRYHGKWPLVILHNKRIAKLMENSSNRHLIETWRTNGALYTSPSGSNDDWYWLYAAIKLNCLLVTNDEMRDHIFELLGSSFFPKWKQRHRVKYTFNKGKAVLVMPPSYSSEIQESEMGSWHIPMEEKSGDERGRIWLCIGRGGSCKEHGEVPTTNGVVHEIPPTEASKVVQQRLAENKNETISGKRKDRD

SEQ ID NO: 150 - protein, 384 aa, Artificial Sequence
  mutant Sorghum bicolor _3b
MHPIPAYTVSGSSAGTDAAPYRMPHASSASVSPSPSPSRRRAIPAAASHAEAPLAAARSDKAATAGKSEWNAAQVKDAIVANGGGCHRLGWLGTGPWTVQRVRVGADDHCGGCRYRLACIDIDMEETRRFADSVAGLALERETKTNFSRFQEWLEANKEYQAIVDGANIALYQQNFAEGGFSLTQLDAVITELRDRYHGKWPLVILHDKRIAKLMENSSNRHLIETWRTNGALYTSPSGSNDDWYWLYAAIKLNCLLVTNDEMRDHIFELLGSSFFPKWKQRHRVKYTFNKGKAVLVMPPPYSSEVQESEMGAWHIPMEEKSGDERGRIWLCIGRGGSCKEHGEVPATNGVVHEIPPTEASNVVQQRLAENKDESITGKRKDRD

SEQ ID NO: 151 - protein, 650 aa, Artificial Sequence
  mutant Hordeum vulgare 1
MHSYSSSTATALDDPPPPPSPDAPTPTGQGGDTKAARRRRARESPEGLLKHRLDMCSRDADLATALQLYEAAVDPATAVPLALHHYNCLLYLCSNSGDADAARRGFEIFAAMEAQGVEPNEATLTSLARLAAAVRDPAMAFSVVRRMAAAGIPPRLRSYGPALFAYCDARDANGAAEVEAHMDAGGVVPEETELTALLRVNADIGRADQVYRVLHRTRTLVRQVCQATAQVVEAWFRSDAAAEAGVDKWDARKVREGVVKGGGGWHGQGWLGKGQWDVGQSEMDKDGRCQRCGEKLVCIDIDPSETETFAKSLAELACNREVRDDFVRFQDWLHRHGPFDAVIDAANVGLYKSKAFSFSQVNSVVNGIQRVTKSKKLPLIVLHRSRVNCGPAKTPQNQKLIESWRNAGALYSTPPGSNDDWYWLYAAVSCRSLLVTNDEMRDHLFQLLGTSFFPRWKEKHQVRLTYSGRGPTFHLPPPYSIVIQESEAGSWHVPTTTGDDIESPRQWVCATRKTSERPPSPPPQARATSKTLEGPPSPPPQARATGKTSEGPPSPLPQARATRKTSEGPPSPPPQARTTSKTLERPASSPPQAHAGSKTLDRPPSPLPQARAARKTSGRLPSPPPQASATNKNAERPSPSPKARLSDLGW

SEQ ID NO: 152 - protein, 527 aa, Artificial Sequence
  mutant Hordeum vulgare 3
MGPNSDLSRTLTDCTRRGDAAAAMAAFDAAASGPDDLRLAAHQYNQLLHLLATAPFPGHPAAAARRVFAHMLGAGAAPSEATITSLARVVAADADAEGADEAFALVSTMRDKYGLAPRLRSYSPVLAAFRRAGDAGKAYAVEAHMAASAVSPEEPEVAALLEVSAKAGDADKVYEYMHKLRRAVGCVTEETAEVLEGWFRSEEAAAAGKAEWDACRVKEAIVAKGGGCHQLGWLRTGPWTVQRVRVAADGECGGCGCRLASVDIDMEDTHKFADSISGLALERETKANFSHFQEWLEEHKEYEAIVDGANIALYQQNFSEGGFSLVQLDAVVTELRDRYNGKWPLVVLHNKRIAKLMETPSNRHLIEIWRANGALYTSPSGSNDDWYWLYAAIGLNCLLVTNDEMRDHIFELLGSSSFFYKWKQRHRVKYTFNKGKAVLVLPPPYSSEIQESETGSWHVPIEEKSGDERARTWLCIGRTDLTKLPREPLVANGVAQDLSPSEASNGAGQRQSAEQAAPVTGKRKDRD

SEQ ID NO: 153 - protein, 529 aa, Artificial Sequence
  mutant Oryza officinalis_1
MTASLRRSSLPFARPRRHSTTTTTAETRPKPNESNAARRRRARDSPEGLLKAKLDICSRDNDLPTALTLYEAAISPDSLIPLSVGHYNCLLYLCANAAAASSPDAAHRGFDIFSRMEADGVQPNEATLTIVARLAAARRDPAMAFSIVRRMATAGSAPHLRSYGPALFAYCDAGDADGATEVEAHMDASGVVPEEPELAALLRVNSARGRPEQVYRILHRARVLLRQVADATAQLLESWFASHAASEAGLHDWDATKVKEGLRNGGGGWHGQGWLGKGQWTVGRSEMDKDGTCQRCGEKLVCIDIDPSETQSFAESVAQIAINRDANFIKFQEWLECHGPFDAVIDAANVGLYNRNSFSFYEVNRVVNGIQRITKSKKLPLIILHKNRVNGGPAKLPQNQKLLECWQRAGALYATPPGSDDDWYWLYAAVICRSLLVTNDEMRDHLFQLLGTSFFPRWKEKHQVRLTFSGRGWNFHLPPPYSIVIQESEEGSWHVPTTNGDDIEKPRQWICATRKISGKSSQAFARAVG

SEQ ID NO: 154 - protein, 510 aa, Artificial Sequence
  mutant Manihot esculenta 1
MESSALAMDKVSNKSKRKARQESPEGVLKLKLDMCSKHGDVVQALHLYDEARTNGVQLNQHHYSVLLYLCSSGSSVKLNGNVVDANASSLYYKRGFEIFQQMIIDKVAPSEATFTNAARLALALEDPEMAFDLVKQMKGFNILPKLRSYGPALFGFCSKGMADRAYEVDAHMAESGVMPEEPELSALLKLSADVKRADKVYDTLHRLRAIIRQVTDSTLGIIEDWFNSEDASKIGEENWDTSKVRKGILMGGGGWHGQGWLGSGQWRAVRTQIDEKGGCHSCGEKLVCIDIDPRETENFATSLSNLACQREVRTDFVRFQEWLQQHGPFDAVVDGANLGLVNQRTFSFYQLNSVVGKLREMSPSKRLPLIILHKRRVTGGPATNPKNKMLLEFWKKSGALYTTPAGSNDDWYWLYAAVTCNCLLVTNDEMRDHLFQLLGTSFFPRWKEKHQVRISVSRSGLTLQMPPPYSIVIQESENGSWHVPTIAGDDLETPRQWLCATRAKNKVIPF

SEQ ID NO: 155 - protein, 738 aa, Artificial Sequence
  mutant Manihot esculenta 2
MASFPFNTLQPKHHLSTTLCKYPLSLNTLNFHCSFHFLTFYPFEHKPSFVRRASGNDINIKTKLSTANHENPTKTKNLRIRKSSSTVDERVGRKFVNNLVESVIEESIDERFTKNRNGRKDMGFRKRRDIDSGDLSTRFRDGNKKREALEIMDLQAINGIAKGSKENKPDSVEVKFRLDLDMCSKKGDVMGAIQLYDLALKEGIKMEQYHHAVLLYLCSSAAVDEDIKKYALRRGFEIYEKMCTDEVPVNEATLTAVARMAMSMGNGDMAFDMVKRMKPLGLNPRLRSYGPALSTFCNNGDVDKAFAVEKHMLEHGVHPEEPELEALLRVSVEAGKGDKVYYLLHKLRTTVRKIPPCTADIVVRWFKSKAASRVGKTKWNKRVIKEAIENGGGGWHGRGWLGKGKWNVSFTSIGPDAFCRCCGEKLATIDLDPAETQNFAESVASIAIKREKNSSFEKFQKWLNYYGPFEAVIDGANVGLLSEKIFIPSKINAIANGIRQQLPSKRWPLIVLHNRRVSGHNMNEPANKALIEKWKNADALYATPTGSNDDWYWLYAAIKFKCLLVTNDEMRDHTFQLLGNDFFPKWKERHQVHFNFSDVGPVFHMPPCFSVVIQESERGNWHIPIATDDDYEPERNWLCITRANSSVARHDSMTTRTEDSQSVDHSNDKQAMSPMQNSLKEKQEYNQCSLEVLSNSPQAVYKNLRNVLLASGFTERRTILQEIEAAEKLGGCVIDFQI

SEQ ID NO: 156 - protein, 551 aa, Artificial Sequence
  mutant Manihot esculenta_3
MQNKNQTPESQFNYNLNFFSKSKDLRSAVSLYDSAVSSDTRLSQHHFNTLLYLCSISLSDPSTKELALQYGVRVFDHMVANGIKPNEASITAVARLAAAKGDGDYAFDLVKNMGVHNELPRLRTYDPVLLCFCDKLEADKAYEVEVHMESMGVSLEETELAALLKVSAETGNEERFYGYLQKLRKTVRCVREETAKIIEDWFQNFEHNGQELNVGLVREAVTRNGGGWHGIGWIGKGRWVVRRGNVDNDGKCFCCGEHLARIDIDDTETERFAASVAGLAMEREVKAYFNEFQDWLDKHPNYEAIVDGANVGLYQQNFAEGGFSVSQLDAVVKELYGQSGNWPLIVLHNKRVRALLENPSHSKLIQEWIEKEVLYTTPHGSNDDWYWLYAAVKLRCLLVTNDEMRDHIFELLGSNFFLRWKERHQVRYTFMKGNLKLHMPGPFSVVIQESEKGAWHVPIAGDGNEDSKQSWLCITRPSAWGEPGEDAVSMETCENGDSVWNGCKLLSPCKPKCISSCDSEPERQDSFQESDNKPATMTGKRKERSPSPSIS

SEQ ID NO: 157 - protein, 565 aa, Artificial Sequence
  mutant Theobroma cacao 1
MLGVNPYVPSMSMFKKIPFSFIYRNCFHRSLLPFGMCYYHLFLKPVSISNVHVNYFAVDKTRNLSAVATAAKSTVNTSNSTNAMSNSPESVLKYKLDMCSKHGKLVEALRLYEEGRSNGVTLKQHHYNVLLYLCAREASGDGVELKELGLKRGFEIFQKMVGDKVSPNETAFTSMARLAVAREDLDLAFELVKQMKSLGIPPKLRSYGPALFGFCEKGNAEKGYELDAHMAESGVTPEEPELSALLKVSADTKNADKVYDMLQRLRATVRQVSESTFQIIEDWFKSEDAAKVGVESWDVNKIKKGVVDGGGGWHGQGWLGSGRWRVMRTKMTENGVCRCCGEKLVSIDIDPKETENFATKLTELACNREVKADFIRFQEWLQQHGPFDAVVDGANVGLIKADTFNFNQLNNVVNQLRQMSPSKRSPLVILHQGRVTNGPARNPNNRNWLDSWKRAGALYATPAGSNDDWYWLYAAVSCKCLLVTNDEMRDHLFQLLGTSFFPRWKEKHQVRLSMTRLGLSLHMPPPYSIVIQESESGSWHVPTIADDDLLNPRQWLCVGRTRNKS

SEQ ID NO: 158 - protein, 828 aa, Artificial Sequence
  mutant Theobroma cacao 2
MGNSKSKKEIGSGFNSLRSGNEGAERNSLENLFSSVLEGKAERKRYAKDKNARKRDKYFERGREMGSGDSSLRAKDENMGSKQKSSKNVNNLVAKEKVEGKTKDGDGLVKEKRLGKRSKKDQANSPEVHLRVQLDMCSKRGDVMGAIQLYDKALREKIKMGQYHYAVLLYLCSSAAVGVVQPAKSGSGSRPLNMLNVSNEASSMNSMGLGEPIDKDSENSSASELSNPILNNGKLVDSSRSQGNIDKLKVRFSESFCNLDNTFPDKNLNQFSNGSPKPYSRLSEGSSYQKKRDEDHLDIDDKSSSDREDYEIGVSEDVKKYALLKGFEIYEKMCLDNVPMNEATLTAVARMAMSMGNGDMAFDVVKKMNQLGINPRLRSYGPALSVFCNIGDVDKAFEVEKHMLEHGIHPEEPELEALLRVSVEAGRGDNVYYLLHKLRTSVRKVSPSTADKIVKWFESKEASRLGKRTMDQRFIKEAIENGGGGWHGQGWLGKGRWIISHTAVGADALCKCCGEKLALIDLDPVETEKFAESVASIATKREKHFSFQKFQKWLDYYGPFEAVVDAANVGLFSQRRFMPSKVNAVVNGIRQKLPSKKWPLIVLHNKRITGQKMDEPVNKALIEKWKNADALYATPTGSNDDWYWLYAAIKFKCLIVTNDEMRDHTFQLLGNDFFPKWKERHQVHFSFSNAGPVFYMPPPCSVVIQESEKGHWHIPIASELDYDTERTWLCIRRAKSHVVKEDSSTIPEDLQPLDRNKECTRPTIQTEVNTNSLSLKDGNHDKPQKHTEEIYKNIRDILSVPVPSDQCTVLSEIEAAEMLGNCVIDFQI

SEQ ID NO: 159 - protein, 555 aa, Artificial Sequence
  mutant Theobroma cacao 3
MATPSHKGNPTPEANFLYELNSCSKSKDLEAAISLYESAISNKTRLNQHHFNTLLYLCSTISTDPESKSLALTYGFRVFDHMITLNIHPNEASITAIARLAAAKGDGDYAFEMIKKLGDYRVLPRLRTYEPALFCFCQKLEAEKAYEVEADINKMGLSLEEPQIAALLKLSAETGRGEGVYEYLQKLRRGVRWVSEETGKVLEDWFSREGSEVGFEGATYEVSFVKEAVLRNGGGWHGLGWIGKGKWVVRKGKVEPNGRCCCCGERLGCVDIDDVETEKFAQSVAGLAMEREVKANFREFQEWLEQNADYEAIVDGANIGLYQQNFAEGGFSILQLDAVIKEMYGRSGNKWPLIILHNKRVRALLENPSYRKLVEEWMNNGFLYTTPHGSNDDWYWLYAAVKLRCLLVTNDEMRDHIFELLGSSFFLKWKERHQVRYTFPKGILKLQMPPSYSVVIQESEKGSWHVPIVCDGNEESARTWLCITRPGACEDLGKTASNIETCENGNGPCCKSEMSNTGDFEILPSDNRNQASQDFFQMSYAETPSITGKRKERSP

SEQ ID NO: 160 - protein, 508 aa, Artificial Sequence
  mutant Cucumis sativus 1
MASSTSSSNKVSHKLRKKALKEAPESVLKYNLDMCSKYGQVVKALELYDEARSNGIQLNQHHYNVLLYLCSSPSLLETSGANNLSSVVLSRGFEIFQQMMTDKVSPNEATFTSLARIAAARDDPEMAFSLVKQMKDYHIAPRLRSYGPALFGFCRKLMPKEAYEVDSHMLASAVEPEELELSALLKLSSDVKKADKVYELLHRLRRTVRQVSEPTAKVIEDWFNSESASEVGKKHWDVDKVRECIVRRGGGWHGEGWLGSGKWKLVRTGIDDNGVCHSCAQKLVCIDIDPKETEDFASSLTKLANQRVKADFNNFQGWLEKHGPFDAVIDGANVGLVNERQFNFIQLKRAVYQMRELSPSKKMPLIILHKRRITDGPARNPNNMKLIETWKNCGALYATPYSVNDDWYWLYAAVRFKCLLLTNDEMRDHLFQLLGNTFFPQWKEKHQVRLSVSRNGLKLHMPPSYSIVIQESENGSLHVPTTTGDDLETPREWLCATRPTNTSMSGFE

SEQ ID NO: 161 - protein, 682 aa, Artificial Sequence
  mutant Cucumis sativus 2
MEFSATKNRKPSSKPSFSMTQKLNKNGSPHLGHGNETLVKNSVEDLVNLEVDERTRKRFEKGKNARDSSRSVNGMKMGDGISFLKTSTDSASLKVSRDGGKIKEKRKGNQVVEEKGKLLKGNNETPFRANLDMCSKTGDFIGAIKLYEWAQKEGINLEQYHYAVILYLCSSAALDFKKYALETGFEIYEKMCAENIPMNEATLTSVARMAMSMGDGDKAFDMVKQMKPLGLNPRLRSYGPALSTFCKNGKLEKAFSVEKHMLEHGVYPEEPELAALLRVSINASNAEKVYYLLHKLRTSVRQVLPSTADLIITWFKSKDAARVGKVKLDRKIIKKAIGNGGGGWHGLGWLGRGKWSVSSTNVGKDGLCKSCGEKLATIDLDPIETENFAESVAAIVTQREKNSSFQKFQKWLEYYGPFEAVIDAANVGLFSQRKFAPSKVNLIANGIRQKLPSKKWPLIILHNRRITGRKMEEPVNKTLIEKWKNADALYATPTGSNDDWYWLYAAIKFKCLIVTNDEMRDHTFQLLGNDFFPRWKERHQVHFSFSATGPVFHMPPPCSVVIQESENGHWHVPLASEHSYEEDRKWLCITRGNLQSQMARQEPPRKTEPQSLLLNKGNLGTRADVDIKKQPSTQVLTKNSSQDNYKSLKQILSAAVFSDKCNLLKEMEAAEKLGGCTIDFQI

SEQ ID NO: 162 - protein, 524 aa, Artificial Sequence
  mutant Cucumis sativus 3
MQSPEVKFQLDLTDCSRRKDLLSAITLCETAVSEKLKFNQQHFNTLLYLCSTAISDPSLKESAVSFGFRVYNLLQSIGVIPNEATVTAVARLAAAKRDGDSAFELVKTIGKYKVTPRLRTYDPALICFCENLEVDKAYEVEQHMNSAGVELEEPQISALLKLSSDTGKEDKVYEYLHKLRRVVKCVSESTAKIIEGWFCSEKASDIGESTMDIGLIREAILSNGGGWHGKGWIGKGNWVVKRTNVYSSGKCCCCAQQLVGVDISCAETENFAQSLAALAIEREAQPNFISFQEWLEVHNHCDAIVDGANVGLYQQNFADSGFNLSQVEAVVKELCKMSGGKWPLVLWHNKRTRASLDNSSHRKVVEEWIDKGVLYSTPIGSNDDWYWLYAAVKLKCLLVTNDEMRDHIFELLGNDLFLRWKEKHQIRYTFVKGQLRLEMPPPYSVVIQESETGSWHVPIAANDSELERTWLCVTRPGVSAASDVAVNGETCESIEAQGSCASMSVKLLDSSVARKRKERPSSTS

SEQ ID NO: 163 - protein, 552 aa, Artificial Sequence
  mutant Vitis vinifera 1a
MSLLYGCSHHHFKPTTYSPYIKVRIFMNKSAHFSNLALSATNKYIPESSAVAETMSNKARKKARRESPEGVLRFKLDMCSKRGDVVEALRLYDEARSRGVPLSQHHYNVLLYLCSCSGSNGDENVVNLALKRGFEIFKQMGVDGIEPNEATFTSAARLACAMEDPEMAFNLVKQMKSCGIPPKLRSYGPPLFGFCKKGDADRAYEVDAHMMESGVVAEEPELCALLGLSVESRRVDRVYEMVHRLRASVRQVSESTAEVVERWFNSEDAAGVGEENWDVGKVREGVVKGGGGWHGQGWLGKGKWKVVRTEMDEAGVCQSCGEKLVCIDIDPRETENFASSLTKLACQREVKADFVQFQEWLQRHGPFDAVVDGANVSLINQKSFSFFELNSVVNRLRQISPSKRLPLVILHRSRVTGGPAQNPNNKKLIESWKKSGALYATPAGSNDDWYWLYAAVNCNCLLVTNDEMRDHLFQLLGTSFFPRWKEKHQVRLTITRRGPVLHMPPPYSIVIQESEQGSWHVPTVTGDDLETPRQWLCATRTRKNHRHPQHLE

SEQ ID NO: 164 - protein, 552 aa, Artificial Sequence
  mutant Vitis vinifera 1b
MPLLHGCSHHHFKPTTYSPYIKDRIFMNKSAHFSNLALSATNKYIPESSAAAKTMSNKARKKARRESPEGVLRFKLDMCSKRGDVVEALRLYDEARSLGVPLSQHNYNVLLYLCSCSGSNGDENVVNLALKRGFEIFKQMGVDGIEPNEATFTSAARLACAMEDPEMAFNLVKQMKSCGIPPKLRSYGPPLFGFCKKGDANRAYEVDAHMVESGVVAEEPELCALLGLSVESRWVDQVYEMMHRLRASVRQVSESTAEVVERWFNSEDAAGVGEENWDVGKVREGVVKGGGGWHGQGWLGKGKWKVGRTEMDEAGVCQSCGEKLVGIDIDPRETENFASSLTKLACQREVKADFVQFQEWLQWHGPFDAVVDGANVSLINQKSFSFFELNSVVNCLRQISPSKQLPLVILHRSRVTGGPAQNPNNEKLIQSWKKSGALYATPAGSNDDWYWLYAAVNGNCLLVTNDEMRDHLFQLLGTSFFPRWKEKHQVRLTMTRRGPVLHMPPPYSIVIQESEQGSWHVPTVIGDDLETPRQWLCATRTRKNHRHPQHLE

SEQ ID NO: 165 - protein, 737 aa, Artificial Sequence
  mutant Vitis vinifera 2
MCPSPFNAFKFHHSSHFLTFSSPKHTPPPRKSALLIVRPHVGHLYAKLCTADHEPSTADMGGRTGKETGSGFSSYGSKGERVGRKSVKTHVGWAVEEKNEKRFTRERYSKKRLDSRRNGGTSSKFPSLKSESKNLVNKSLKANEKEEEKSKKGDADKVREEMEKGSKKNKVDSQEGLLRVGLEMCSKNGDVMGALELYDSALREGIELGQYHYTVLLYLCSSAALDFKKYALRRGFEIYEKMCLEKVPMNEATLTSVARMAMSMGNGDMAFDMVKQMKPLGINPRLRSYGPALSAFCNNGDIEKAFGVEEHMLEHGVYPEEPELEALLRVGIEAGKSDKVYYVLHKLRTSVRQVSHSTANLIEKWFKSNAAAAAGKGNWDQRLISEAIVNGGGGWHGQGWLGKGKWNVSHTNVGADGLCLCCGEKLATIDLDPTETEKFAESVASIAIKREKNSSFQKFQKWLDYYGPYEAVVDAANVGLFSQRRFIPSKVNAIVNGIRQMLPSKKWPLIILHNKRITGKKMDEPANRALIEKWKNADALYTTPTGSNDDWYWLYAAIKFKCLIVTNDEMRDHIFQLLGNDFFPKWKERHQVHFSFSDSGPVFHMPPPCSVIIQESENGHWHIPVASEHDSEGERTWLCVTRANSQMAKQSPSPRNKESQYPCYDKRRVRSDTQTEIHKELSSSNHRNQEKSKAPPQEIYRNLRNILSASIFPTHSTVLSEIEAAEKLGNCIIDFQI

SEQ ID NO: 166 - protein, 526 aa, Artificial Sequence
  mutant Vitis vinifera 3
MDLSGAVALFESAVSQNFRLIHYHFNALLYLCTISIDEPSSKALALDYGFRIFDHMVNSGVTPNEATITAVARLAAAKSDGDLAFEVVRTMGKYELSPRLRTYGPALYWFCANLEGEKAWAVEEHMVSMGVHPEEPELAALLKVSAEMGRGDKVYAYLHKLRTAVRSVSESTAEIIEGWFCGEAASEVGGVDCCLGAIEEVALKNGGGWHGQGWIGKGKWLVCRAKVDSSGQCGSCREQLATVDIDRAETETFLESVAAMAMEREVRSNFREFQDWLDKHADYEAIVDGANIGLYQQNFANGEFSIPQLDAVVKELYDRSQKKRPLVILHNKRFRKLSENASNRKLLQEWLTQGVLYTTPNGSNDDWYWLYAAVKLKCLLVTNDEMRDHIFELLGSSFFLKWKERHQVRYTFVKGNVKLLMPPSYSLFIQESVKGTWHVPVASESSDESLRTWHCITRPSSHELNGKASVNLETCEIDRQEQCDFKLSSCKSEGLRNGSCENKTTTMTGKRKDRSPSPSPSPMQRH

SEQ ID NO: 167 - protein, 530 aa, Artificial Sequence
  mutant Glycine max 1a
MTAATNFSITSLARTPKSRDEGTTTIVKLSSKARRKAFYESPEGVLLRKLNECSKDGNVAQALCHYDEARKLGVLLNLDHYNKLLYLCSIESAAGFPNLGLKRGFEVFQQMLNDRVQPNEATFTNAARLAAANEDPDMAFELLKQMKNVAIAPKLRSYEPALFGFCKRGDAEKAYLVDADMVESGIVAEEPELSALLEVSVNAKKEDKVYDILHRLRSTLRQVSESTLGIVEDWFNSEYAAKIGKEKWDVKKVREGIAQGGGGWHGQGWLGSGRWKVANTQVNEDGVCPLCGEKLVSIDIDPKETENFAASLSKLACQKEAKANFVHFQTWLEQHGPFDAVVDGANVGLANGHNFSFSQLNTVVEQLRQISPSKRLPLIILHISRVRGGPAQNPKNMRLIENWKKNGALYATPQGSNDDWYWLYAAVSCKCLLLTNDEMRDHLFQLLGSNFFPRWKEKHQVRTSASTCGHSIIMPPRYSIVIQESANGSWHVPTVTTDDHEIPRKWLCATRSRKDSLHNLWTSSSKSDCT

SEQ ID NO: 168 - protein, 530 aa, Artificial Sequence; identical to SEQ ID NO: 167
  mutant Glycine max 1b

SEQ ID NO: 169 - protein, 651 aa, Artificial Sequence
  mutant Glycine max 2
MAGISSTSSSSEVSERVKKKKKKKKNKDKDCPEVKLKNALDMCSKRGDVMGALSLYDSAISEGVKLGQHHYTVLLYLCSSAAVGVVRPAKSGSGARTLNSHVYSNEVPNEGTHFDLDGKAELNSDLNSTEKDEILLVSEDVKRYALQRGFEVYQNMCLDKVQMNEAALTAVARMAMSMGDGDRAFEMVRQMKDLGISPRLRSYGPALFTFCNNGEIDKAFAVEKHMLQHGVYPEEPELEALLRVSVGAGNSDKVYYVLHKLRSIVRKVSPTTSSLIVDWFKSKQASRVGKRKWDERLIREAIENNGGGWHGQGWLGKGKWEAVHTTIGKDGMCKCCQVQLTTIDLDPVETENFAKSVASLAVMREKGSNFQKFQKWLDYSGPFEAVVDAANVGLFGQGRFMPHKINAVANEIRQRLPSKKFPLIILHNKRIKGDKMDEPINRALIDKWNNADALYATPTGSNDDWYWLYAAIKFRCLLVTNDEMRDHLFQLLGNDFFPKWKERHQVRFSFSDTGSPVFHMPPPCSVVIQESEEGHWHIPIDAELNDESERRWLCITRAKLDVVSKDSSTSKDSKPLQKGECARSATRNASAKESQHQNLVNHKEKKETPQELYKNVRDIFLESVSSDKNNSILSDIEAAELIGGCTIDFQI

SEQ ID NO: 170 - protein, 520 aa, Artificial Sequence
  mutant Glycine max 3a
MGCRNPETKFQFELNSCSKAKDLRGAISLYDDAVSNNTRLNQHHFNALLYLCSNSVADPSLKPTALDYGFRAFRHMSALAVLPNEATVTAVARLAAAKGDADYAFELVKSMGKNYNNALPRLRTYDPALFCFCEMLDADKAYEVEEHMNGVGVSLEEAELAALLKVSARCGRVDKVYEYLHRLRSSVRCVSESTAVVIEEWFRGSKASEVGEAEFDAGRVKEGVLRNGGGWHGQGWVGKGDWVVSRTSVVADGHCCCCGQQLVCVDIDDVETEKFAGSVAALAFEREVKANFSEFQAWLEKHASYEAIVDGANIGLYQQNFADGGFNISQLDDVVKELYNRSGKKWPLVVLHNKRLRGLMENPSSRRLVEEWMKNGVLYTTPNGSNDDWYWLFAAVKLRCLLVTNDEMRDHIFELIGSNFFNQWKERHQVHYTFVKGNLKLQMPPSYSLVIQESEKGYWHVPLVSGTSCESTRCWLCITRPSGHDAVATVSNGVSSLDSQVDENSATSIAGKRKERSPPS

SEQ ID NO: 171 - protein, 520 aa, Artificial Sequence
  mutant Glycine max 3b
MGSQNPEAKFQFELNTCSKAKDLRGAISLYDDAVSNNTRLNQHHFNALLYLCSNSVADPSLKPTALDYGFRAFCHMSALAVLPNEATVTAVARLAAAKGDADYAFDLVKSMGKNYNNALPRLRTYDPALFCFCEMLDADKAYEVEEHMSGVGVSLEEAEVAALLKVSARCGRADKVYEYLHKLRSSVRCVSESSAVVIEEWFRGSKSSEVGEVEFEAGQVKEGVLRNGGGWHGQGWVGKGDWVVSRTSVGADGHCCCCGEQLVCVDIDDAEREKFAGSVAALAFEREVKANFSEFQAWLEKHASYEAIVDGANIGLYQQNFADGGFSISQLDDVVKELYNRSGKKWPLVVLHNKRLRGLMENPSSRRLVEEWMNNGALYTTPNGSNDDWYWLFAAVKLRCLLVTNDEMRDHIFELIGSNFFNQWKERHQVHYTFVKGNLKLQMPPSYSLVIQESEKGYWHVPLAPGTSCESTRCWLCITRPCGHDVVATVSNGVSSLDSQVDENNATSVTGKRKERSPPS

SEQ ID NO: 172 - protein, 521 aa, Artificial Sequence
  mutant Prunus persica_1
MSMDNFSMDKRLHLCTLALSNDSPSRSASAPLVSNKSKKKARRESPEGVLRHKLDMCSRQGHLVEALRIYDEARSRGLPLSLHHYNVLLYLCSSNGGADDDGVGLKRGFEIFRQMVDDKVVPNEATFTSAARLAAAAEDPEMAFHLVKQMKGLGIPPKLRSYGPALFGFCKKGEADRAYEVDAHMVESKVIAEEPEISALLKVSSDSSKGDKVYEMLHRLRISVRQVSESTSGVVEEWFMSEEAANVGMESWDVEKVREGVVRGGGGWHGQGWLGSGNWRVVRTQMDEAGTCSCCGQKLVSIDIDPKETENFATSLNKLASQREVKADFFQFKEWLQKHGPFDAVIDGANVGLINLHNFSFSQLNTLVNRLRQMSPSKRLPLVILHTNRVTGGPAQNPNNKKLLESWKKAGALYATPAGSNDDWYWLYAAVNSKCLLVTNDEMRDHLFQLLGTNFFPRWKEKHQVRMSVSRQGLALHMPPPYSIVIQESEDGRWHVPTTIGDDIETPRQWLCATRATTNTK

SEQ ID NO: 173 - protein, 826 aa, Artificial Sequence
  mutant Prunus persica_2
MALNSFKFHCPSHFLTFSPPKQTLELKHTLQLYPLPVVRENISHIVAKLSTTYREPYIKTKSPGTGTEFSSLKSTEERVGKKSVKNHVGSVEEKKAEDRFSKDRNTRKNPGFRKRRDDNEHSSRRLKDENKVNFSGKRNDKQAGEEKRGKGSKKYDVDAPEVKMRIGLDMCSKRGDVMGAIKFYDLAQREEIKLEQYHYTVLLYLCSSAAVGVVRPAKSGSGSRTLDTLDSSASEETRVNSMELGSGNWDGRGLNTSTLDTEQLVDTNGSNGEKMGFDDLDGTSDEKENLAWFSNGFVKRNSRLLDGLNYPTKGGDDSSNLKDGSIKQEDNRIRVSEEVKKYALQRGFEIYEKMCLDNVPMNEAALTSVARMAMSMGDGDMAFDMVKQMKSLGINPRLRSYGPALSAFCHSGDIDKAFAVEKHMLDHGVYPEEPELEALLRVSVGVGKGDKVYYMLHKLRTSVRRVSPSTADLIMNWFHSKEAARVGKIKWDPRLIREAIENGGGGWHGQGWLGKGKWSVLRTTIGADGLCKCCGEKLATIDLDPVETENFAESVASIAIKREKNSSFQKFQKWLDYYGPFEAVVDGANVGLFSQKKFIPSKVNAVVNGIRQKLPSKRWPLIVLHNRRISGGKMDERVNRALIEKWQNADALYATPTGSNDDWYWLYAAIKFKCLLVTNDEMRDHIFQLLGNDFFPRWKERHQVHFSFSDAGPVFHMPPPCSVVIQESEEGHWHIPVVSEHDCEAERTWLCIMRSKSRLERNDSATRPEGNSECYQFMKYTKHQPREFFENIKDILSGSMISDCHSIVPDIATAEKIGGCVIDFQI

SEQ ID NO: 174 - protein, 543 aa, Artificial Sequence
  mutant Prunus persica_3
MQTPETQFHSSLTLCSKHKDLPSAISLYESAVSQKTHFNHHHFNTLLYLCSNSVSDPSLKQLALDNGFRVFNQMLSIGTLPNEATITAVARLAAAKGDGDYAFGLVKGMDKYNVLPRLRTCDPALFCFCEKLEAEKAYEVEEHMGMVGVSLEEPEIAALLKVSAETGNGERVYGYLHKLRNVVRCVGESTAKIIEDWFLGGVACELGEANWDSGGVKEAVLRNGGGWHGQGWIGKGVWDVRRANADMSSSQCCSCGERLVCVDIDCGETQRFAESVAALAMEREVKSNFSEFQDWLDKHAEYEAIVDGANIGLYQQNFADGGFSLSQLDAVVKELYNKSGEKWPLVVMHNRRFRGLVENPSHRKLIEEWMDKGILYATPSGSNDDWYWLYAAVKLKCLLVTNDEMRDHIFELLGSSFFLKWKDRHQVRYTFVKGNLQLQMPPPYSSVIQESEIGSWHVPVADDSCQEPARTWLCITRPSVSKASGEVSHNLETSRTGGVCRNLESLNSCTTEFVASHNEKTTVVTGKRKERSPSPSQLNLSSA

SEQ ID NO: 175 - protein, 485 aa, Artificial Sequence
  mutant Malus domestica 1
  misc_feature (227)..(227): Xaa can be any naturally occurring amino acid
  misc_feature (303)..(303): Xaa can be any naturally occurring amino acid
  misc_feature (427)..(427): Xaa can be any naturally occurring amino acid
  misc_feature (446)..(446): Xaa can be any naturally occurring amino acid
  misc_feature (474)..(474): Xaa can be any naturally occurring amino acid
  misc_feature (480)..(480): Xaa can be any naturally occurring amino acid
MAMKKARRESPEGVLRHKLDMCSRHGQLVQALSLYDEARSNGVPLSLHHYNVLLYLCSSNGGGDDGDMGLKRGFEIFRQMVEDKVVPNEATFTSAARLAIAGEDPEMAFHLVKQMKGLGFPPKLRSYGPALFEFCKKGEADRAYEVDAHMVESGVVAEEPEITALIKVSSDSSRGDKVYEMLHRLRTTVRQVSESTYGVVEEWFKSEEAAKVGVETWDVNKVREGVXRGGGGWHGQGWLGSGNWRVERTQMDEVGTCSCCGEKLVSIDIDPKETENFATSLSKLASQREVRGDFIRFQEWLQXHGPFDAVVDGANVGLVNQHNFSFFQLDTLVNRLRQMSPSKRLPLVILHQNRVTGGPAQNPNNKRLLESWKKSGALYSTPVGSNDDWYWLYAAVNCKCLLVTNDEMRDHLFQLLGTSFFPRWKEXHQVRLSVSRRGLNLHMPPXYSIVIQEAEDGEWHVPTTTGDDIETPRXWLCATXARNTK

SEQ ID NO: 176 - protein, 747 aa, Artificial Sequence
  mutant Malus domestica 2
  misc_feature (25)..(25): Xaa can be any naturally occurring amino acid
  misc_feature (97)..(97): Xaa can be any naturally occurring amino acid
  misc_feature (213)..(213): Xaa can be any naturally occurring amino acid
  misc_feature (425)..(425): Xaa can be any naturally occurring amino acid
  misc_feature (438)..(438): Xaa can be any naturally occurring amino acid
  misc_feature (452)..(452): Xaa can be any naturally occurring amino acid
  misc_feature (491)..(491): Xaa can be any naturally occurring amino acid
  misc_feature (510)..(510): Xaa can be any naturally occurring amino acid
  misc_feature (574)..(574): Xaa can be any naturally occurring amino acid
  misc_feature (595)..(595): Xaa can be any naturally occurring amino acid
  misc_feature (612)..(612): Xaa can be any naturally occurring amino acid
MAKLSSTTYHEPYTKSQNSGTGSGXEFSSLKSTEQRVSRKPVKNHVGSGVEKNGEDTRKNLVFRKRREGNGPNGPNGPNGHSSRRFRDENAVKSSKXRGSLGVKEGRNKRGGGNQVGGEERRGRGLKKYDADLPEVKMRVGLDMCSKRGDVMGAIRFYDLAQTEEIKLEQYHYTVLLYLCSSAAVGVVRPAKSGSGSRTLDTLDSHSEETRVXSMDTSNLDNEDLDDTCGSNSFDDDSDGTSDENENLAWFSNGFVKRNSRLLDGLNYPTKGGDDSSNVKEGSSKQEDNGIRVSEDVKKYALKRGFEIYEKMCSDNVPVNEAALTSVARMAMSMGDGDMAFDMVRQMKSMGINPRLRSYGPALSAFCHSGDIDKAFAVEKHMLEHGVYPEEPELEALLRVSVGVGKGDKVYYMLHKLRTSVRRVXPSTADLIVKWFLXKEASRVGRTKWDRXSIRDAIENGGGGWHGQGWLGKGKWSVLRTTIGDDGLCKXCGEKLATIDLDPVETENFXESVASIAIKREKNSSFQKFQKWLDYYGPFEAVVDGANVGLFSQKKFVPSKVNAVVNGIRQKLPXKKWPLIVLHNRRITGGRMDEXVNRALIEKWQNADALYXTPTGSNDDWYWLYAAIKFKCLLVTNDEMRDHIFQLLGNDFFPRWKERHQVHFTFSDAGPVFHMPPPCSVVIQESEEGHWHIPVVSEHERESERTWLCIMRAKSRTATKDSAAIPEGDFQGLAICLFLIAQSLLCL

SEQ ID NO: 177 - protein, 542 aa, Artificial Sequence
  mutant Malus domestica 3
  misc_feature (230)..(230): Xaa can be any naturally occurring amino acid
  misc_feature (322)..(322): Xaa can be any naturally occurring amino acid
  misc_feature (335)..(335): Xaa can be any naturally occurring amino acid
MQTPEAQFHSSLTLCSKHKDLPTAISLYESAVSQNTRLNHHHFNTLLYLCSNSVADPSIKQLALENGFRMFDHMLSIGVLPNEATITAMARLAAAKGDGDYAFGLVKGMEKYKIFPRLRSYDPALFCFCEKLEAEKAYEVEEHMGMVGVSLEEPEIAALLKVSAETGNGERVYGYLHKLRNAGRCVSESTAKNIEDWFCGGAACEVGEVNWDSVRVKESVLRNGGGWHGXGWIGKGVWDVKRTNVDLSSSQCSSCGERLVCVDLDCAETERFVKSVAALAMEREVKSNFSEFQDWLDKHAEYEAIVDGANIGLYQQNFADGXFSLTQLDAVVKEXYNRSGGKWPLVVMHNRRFRGLVENPSHRKLFEEWMGKGILYATPSGSNDDWYWLYAAVKLKCLLVTNDEMRDHIFELLGSSFFLKWKERHQVRYTFAKGNLKLQMPPAYSSVIQESDNGSWHVPVADESCQEPGRTWLCITRQSVSKACGEVSQKLASSRNGGICDNHELRSCTSDSVASHNDKTTVVTGKRKERTPSPSHLNISPA

SEQ ID NO: 178 - protein, 545 aa, Artificial Sequence
  mutant Fragaria vesca 1
MIPLPFLSRTSRRFFRPIPHYPKPQPSPISTHTFSMNQRLNNSTLALSRDSPPSPAAPSVSNKARKKARRDLPEAVLKHKLDMCSRHGQVVEALRIYDEARTNGVPLSLHHYNVLLYLCSCDGEDADVGLGRGFEIFRQMVEDKVVPNEATFTNAARLAAASADPEMAFGLVKQMKVFGIEPKLRSYGPALFGFCKKGEAERAYEVDAHMVECGVVAEEAEISALLKISSEMGKGEKVYEMMQRLRSGVRQVGESTAEVVEEWFKSKEAGRVGVERWDVKKVREGVVRGGGGWHGQGWLGSGEWKVVRTQMDEAGTCAGCGQKLVCIDIDPKETEDFALSVTKLANQREVRNDFAQFQEWLQRHGPFDAIVDGANVGLSNQHYFSFIQLNTVVNRLQKLSPANRLPLVILHKSRTIGGPAQTPKNKALLESWKKSRALYATPPGSNDDWYWLYAAVSCKSLLVTNDEMRDHLFQLLGTNFFPRWKEKHQVRVSVSKLGLNLHMPPPYSIVIQESEDGSWHVPTTTGDDIETPRQWLCATRARNTK

SEQ ID NO: 179 - protein, 697 aa, Artificial Sequence
  mutant Fragaria vesca 2
MTYHEPNSKTLKNSATEKPVKNNGSSVVEKKSEKTRFIKQKSTRKEGVWFKGESKERKKRGSSDGDQVGEEKKGRFSKKNKVKVNVDLPEVKMRVGLDMCSKRGDVMGAIKYYDLAQTEEIQLGQYHYTVLLYLCSSAAVGVVRPAKSGSGGTRTLDTVDSSGEKTVELSKVRDSESGNWDDTSGSDESAEKMEVSPGNRFDDDVDGASNEKRNLAWFSNGFVKRNSRLLDGLNNPTKVGDDGTGLEDGNVKQESNEIRVSEDVKKYALQRGFEIYEKMRLDGVAMNEAALTSVARMAMSMGDGDMAFDMVKQMKSMGINPRLRSYGPALSAFCSSGNIDKAFAVEKHMLEHGVYPEEPELEALLRVSVGARKGDKVYYMLHKLRTSVRRVSPSTADLIVKWFESKEASRVGKTKWDERLIRQGIENGGGGWHGQGWLGKGKWSVLRTTIGSDGLCKCCGGKLATIDLDPVETENFAESVASIAIKREKNSSFQKFQKWLDYYGPFEAVVDGANVGLLSQKIFIPSKVNAVVNGIRQKLPSKRWPLIVLHNRRITGGRMDERVNKALIEKWQNADALYATPTGSNDDWYWLYAAIKFKCLLVTNDEMRDHTFQLLGNDFFPRWKERHQVHFNFSEGGPVFHMPPPCSVVIQESEEGHWHIPVVSEHGYEAERMWLCIMRAKSREARKDSATRPKGNL

SEQ ID NO: 180 - protein, 506 aa, Artificial Sequence
  mutant Fragaria vesca 3
MAISLYESAVSRNTRLNQHHFNTLLYLCSNSVTDPALKQSALEYGFRMFDHMSLTEVVPNEATITAVARLAAAKGDGDYAFELVKGMEKYNVLPRLRTCDPALFCFCEKLEADKAYEMEEHMNKVGVSVEEPEISALLKVSAEMGRGERVYDYLHKLRNTVRCVSESTAKIIEDWYRDGRASEVGEVSWDSGRVKEVVLRNGGGWHGQGWIGKGDWDVQRANVDSESKCCSCGEHLVCVDIDCAETDRFAQSVAALAMEREVRLNFSEFQDWLDKHADYEAIVDGANIGLYQQNFADGGFSLPQLDAVVKELYNRSGEKWPLVVLHNRRFKSLVENPSHRKVVEEWMDKGILYTTPSGSNDDWYWLYAAVKLKCLLVTNDEMRDHIFELLGSSFFLKWKERHQVRYTFIKGNLKLQTPPPYSSVIQESESGSWHVPLADDSCEEPARTWLCITRPSVTKASSGVLISQSALPNSCTSQFVTSHNDKTTTKTGKRKERSPSPSHLMI

SEQ ID NO: 181 - protein, 533 aa, Artificial Sequence
  mutant Citrus clementina_1
MADLTTGLCTLAFSKKSTVNESSAPNTGTMSNKSKKKARRESPEGVLRHKLDMCSKRGDVFEALRLYDDARSNGITLSQHHYNVLLYVCSCKCGSESSENGDRETDLNLGLKRGFEIFQQMITDKVDPNEATFTSVARLAVAKEDPEMAFDLVKQMKSFGIPPKLRSYGPALFGFCKLGNTDKAYEVDAHMGESGVVPEEPELSALLKLSVDAKKVDKVYEILHRLRTLVRQVSESTFKIIEDWFDSVDAAEIGVLNWDVSKVREGIVRGGGGWHGQGWLGSGKWRVERTQIDENGVCCSCNERLVCIDIDPRETENFASSLSNLACQREVRSDFNKFQEWLGRHGPFDAVIDGANVGLVNQHNFSFYQLNTVVNRLRQMSPSKRMPLVILHKGRVSGGPAQIPKNKKLLDIWRDGGALYTTPPGSNDDWYWLYAAVNCKSLLVTNDEMRDHLFQLLGTSFFPRWKEKHQIRLSVSRDGLNLLMPPPYSIVIQESENGSWHVPVITGDDLEAPRQWLCATRARVKSLHSLFSN

SEQ ID NO: 182 - protein, 793 aa, Artificial Sequence
  mutant Citrus clementina_2
MKGTASGASSLGTRDKRVDSAGEEKDGKRLTKDNNSRKNFAFLKSREMSSGNSSLRSKDKKIGIKSSKTVNREVDNQKMEQRTNDSGQYKVRGITDEKGSKKSKKDRSEQFQLRVELDMCSKRGDVMGAIRLYDKAQREGIKLGQYHYNVLLYLCSSAAVGVVKPAKSGSGMRTLDTFEVSTMNSTELGDSRDMDNNGQLDYGSSPMIDKLESNSSYRFDDLDSTFNEKENLGQFSNGHMKLNSQLLDGRSNLERGPDDQSRKKDWSIDNQDADEIRLSEDAKKYAFQRGFEIYEKMCLDEVPMNEASLTAVGRMAMSMSDGDMAFDMVKRMKSLGINPRLRSYGPALSVFCNNGDVDKACSVEEHMLEHGVYPEEPELEALLRVSVEAGKGDRVYYLLHKLRTSVRKVSPSTADVIAKWFNSKEAARLGKKKWNESLIRDKMENKGGGWHGLGWLGKGKWIVSHTTVGGDALCKCCGEKLAIIDLDPIETEKFAESVASIAIKRERNSSFQKFQKWLDYYGPFEAVVDAANVGLYSQRNFKPARVNAVVNGIRQKFPSKKWPLIVLHNRRITGHKMDQPVNRALIEKWKNADALYATPTGSNDDWYWLYAAIKFKCLLVTNDEMRDHTFQLLGNDFFPRWKERHQVRFSFSDAGPEFYMPPPCSVVIQESEKGNWHIPIASKQDYDDEERRWLCVTRANSHMNRQNSYSSPKDLQPLDHNKGQASSSTRADAKTKSHSSNDSPSVNTKRPARKMYKNLKNILSASVLSNHQSVLSKIEAAEELGDCVIDFEI

SEQ ID NO: 183 - protein, 456 aa, Artificial Sequence
  mutant Citrus clementina_3
MESAHSQNLRLSLHHFNALLYLCSDSATDPSSKDSALRHGFRVFDQMLSNNVIPNEASVTSVARLAASKNDGDYAFVLIKRMNNEFNVVPRLRTYDPALFCFCENLEAEKAYEVEEHMGLMGLSLEQQEIAALLKVSAETGRVEKVYQYLQKLRSTVRCVNEETGKIIEDWFSGQKVNGVSCDLGLVKNAVLKNGGGWHGLGWIGQGKWVVKRGSVDESGKCCSCGDQLACVDIDDAETERFAQSVAALAMEREVKANFSEFQDWLEKNANYEAIVDGANIGLYQQNFTEGGFSVPQLDAVVKKLYERSGNKWPLVILHNKRLRSLWENPSHRNLVEEWNEKGVLYMTPHGSNDDWYWLYAAVKLRCLLVTNDEMRDHIFELLGSNFFLKWKERHQVHYTFVKGNLKLQMPPPYSSVIQESEKGSWHVPILVKGNSSQTWLCITRPNVCESRDEAQ

SEQ ID NO: 184 - protein, 533 aa, Artificial Sequence
  mutant Citrus sinensis_1
MADLTTGLCTLAFSKKSTVNESSAPNTGTMSNKSKKKARRESPEGVLRHKLDMCSKRGDVFEALRLYDDARSNGITLSQHHYNVLLYVCSCKCGSESSENGDRENDSNLGLKRGFEIFQQMITDKVDPNEATFTSVARLAVAKEDPEMAFDLVKQMKSFGIPPKLRSYGPALFGFCKLGNTDKAYEVDAHMGESGVVPEEPELSALLKLSVDAKKVDKVYEILHRLRTLVRQVSESTFKIIEDWFDSVDAAEIGVLNWDVSKVREGIVRGGGGWHGQGWLGSGKWRVERTQIDENGVCCSCNERLVCIDIDPRETENFASSLSNLACQREVRSDFNKFQEWLGRHGPFDAVIDGANVGLVNQHNFSFYQLNTVVNRLRQMSPSKRMPLVILHKGRVSGGPAQIPKNKKLLDIWRDGGALYTTPPGSNDDWYWLYATVNCKSLLVTNDEMRDHLFQLLGTSFFPRWKEKHQIRLSVSRDGLNLLMPPPYSIVIQESENGSWHVPVITGDDLEAPRQWLCATRARVKSLHSLFSN

SEQ ID NO: 185 - protein, 793 aa, Artificial Sequence
  mutant Citrus sinensis_2
MKGTASGASSLGTRDKRVDSAGEEKDGKRLTKDNNSRKNFAFLKSREMSSGNSSLRSKDKKIGIKSSKTVNREVDNQKMEQRTNDSGQYKVRGITDEKGSKKSKKDRSEQFQLRVELDMCSKRGDVMGAIRLYDKAQREGIKLGQYHYNVLLYLCSSAAVGVVKPAKSGSGMRTLDTFEVSTMNSTELGDSRDMDNNGQLDYGSSPMIDKLESNSSYRFDDLDSTFNEKENLGQFSNGHMKLNSQLLDGRSNLERGPDDQSRKKDWSIDNQDADEIRLSEDAKKYAFQRGFEIYEKMCLDEVPMNEASLTAVGRMAMSMGDGDMAFDMVKRMKSLGINPRLRSYGPALSVFCNNGDVDKACSVEEHMLEHGVYPEEPELEALLRVSVEAGKGDRVYYLLHKLRTSVRKVSPSTADVIAKWFNSKEAARLGKKKWNESLIKDTMENKGGGWHGLGWLGKGKWIVSHTTVGGDALCKCCGEKLAIIDLDPIETEKFAESVASIAIKRERNSSFQKFQKWLDYYGPFEAVVDAANVGLYSQRNFKPARVNAVVNGIRQKFPSKKWPLIVLHNRRITGHKMDQPVNRALIEKWKNADALYATPTGSNDDWYWLYAAIKFKCLLVTNDEMRDHTFQLLGNDFFPRWKERHQVRFSFSDAGPEFYMPPPCSVVIQESEKGNWHIPIASKQDYDDEERRWLCVTRANSHMNRQNSYSSPKDLQPLDHNKGQASSSTRADAKTKSHSSNDSPSVNTKRPARKMYKNLKNILSASVLSNHQSVLSKIEAAEELGDCVIDFEI

SEQ ID NO: 186 - protein, 456 aa, Artificial Sequence; identical to SEQ ID NO: 183
  mutant Citrus sinensis_3

SEQ ID NO: 187 - protein, 532 aa, Artificial Sequence
  mutant Populus trichocarpa 1a
MKHIKDSNFIGAHNLFMKKKATFCNSAISATSQSDEKAVGGNVVSKRLKKKARRDAPEGVLRFKLDMCSKVGDVVEGLRLYDEARRNGVELNQHHYNVMLYLCSQNRGENGSDLKLACKRGFEIFQQMIIDKVPPNEATFTNAARLASVMEDPEMAFDLVKQMKGFGIMPKLRSYGPPLFGFCKKGMVDKAYEVDAHMIESGVVAEEPELSSLLKLSADVNNADKMYELLHRLRTSVRQVMESTVGVIEDWFKSEHAAKIGKGDWDVIKVKEGVVRGGGGWHGQGWLGHGQWRVVRTQMDKKGVCGSCGERLACIDIDPRETENFAISLSKLAFGREVKADFIQFQEWLQQHGPFDAVVDGANVSLINQQTFNFSQLNNVVNRLHDMSPSKKFPLVILHKSRVNGGPAQSPYNKKLLERWKNSGALYATPAGSNDDWYWLYAAVSCKCLLVTNDEMRDHLFQLLGTSFFPRWKEKHQVRLSVSRSGIALHMPPPYSIVIQESENGGWHVPTTTGDDLETPRQWLCATRPVKR

SEQ ID NO: 188 - protein, 496 aa, Artificial Sequence
  mutant Populus trichocarpa 1b
MNEKAVGGNVMSLREKKKARREAPEGVLKFKLDTCSKRGDVVEGLRLYDEARKNGVELNQHHYNVLLYLCSQNGGENVSDLRKQGFEIFQQMIIDKVPPNEATFTNAARLASAMEDPEMAFDLVKQMKGFGILPKLRSYGPPLFGFCKKGMADKAYEVDAHMIEYGVVAEEPELSALLKVSADVNNADKVYELLHRLRTSVRQATESTVGIIEDWFKSKHAAKTGKENWDVRKVKEGVARGGGGWHGQGWLGCGQWRVVRTQMDKEGVCGSCGERLACIDIDPRETEDFAISLSKLALGREVKADFIRFQDWLQRHGPFDAVVDGANLSLINQQTFSFSQLNSVVHRLHDMSPSKKLPLVILHKSRVTGGPAQSPYNKKLLERWKNSGALYVTPAGSNDDWYWLYAAVCYKCLLVTNDEMRDHLFQLLGTSFFPRWKEKHQVRLSVSRSGIALQMPPPYSIVIQESENGSWHVPTTTNDDLETPRQWLCATRPIKS

SEQ ID NO: 189 - protein, 709 aa, Artificial Sequence
  mutant Populus trichocarpa 2
MATTLASNILHAKLSATDHDSPTKTINSRTRKENNALGFPSSRRIAKRVERKHVKNLTTSVVDEKTEKRFSKDRNTRKNMGFRESTGMGSENCTKDGKKGIRFLATMDSQGVCGEMESRTKNGSDIQVIKVDKIGKGSKQDKVDSSELKLRVRLDMCSKRGDVIAAIQLYDLAQREGIKMGQYHYAVLLYLCSSAAFSEDVKKYALQRGCEIFEKMCKEKVPINEATLTAVARMAMSIGNGDLAFEMVKQMDALGINPKLRSYGPALSVFCSSGDIDKAFYVEKHMLEHGVYPEEPELKALLRVSVEGGKGDKVYYLLHKLRRIVRRVSPSTAGIIVRWFNSKAASRVGKTKWDVKEAIENGGGGWHGQGWLGKGKWTVSCTSVGLDGICKYCGQKLTTIDLDAVETEKFAESVASIAIKRDRDSSFQRFQKWLDYYGPFEAVIDGANAGIYNQGRFMPSKINAVVNGIRQKLPSKKWPLIVLHNKRITGRKMDGPVNKAFIEKWKNADALYATPTGSNDDWYWLYAAIKFKCLIVTNDEMRDHTFHLLGNDFFPRWKERHQVHFRFTDAGPDFDMPPPCSVVIQESEKGHWHIPIETEGEGEGEAEREWLCITRANSRTTRHSITTTPGGSQSVGHGKKQARSSMQTRVAIKPDRLKHNIPDNIRKPPQDYKNLKDILAASGFPDHRTVLSEIETAEELGDTVIDFQI

SEQ ID NO: 190 - protein, 557 aa, Artificial Sequence
  mutant Populus trichocarpa 3a
MNQTPESQFNYNLNFYSKSKDLHSAISLYDTAISQDTRLNQHGFNTLLYLCSVSLNDPSTEELALRCGLRIFDHMVSNGIKPNEASITAVARLAAAKGDGDYAFDLVKNVGAYNELPRLRTYDPALFCFCEKLEAHKAYEVEEHMGSMGVGLEEGEIAALLKVSVESRNEKRVYGYLQKLRKMLRCVRGETAKVIEHWFAVFEGSGVELDVDLVREAVSRNGGGWHGLGWIGKGKWVLKRGSVDVGGKCCCCGEQLVSVDIDDDETERFAESVAGLAMQREVKANFSEFQNWLEEHANYEAIVDGANIGLYQQNFAEGGFSISQQLDAVVKDLYNQSGKKWPLIIMHNKRLRALLQNPSTRELIQEWIEKDVLYTTPQGSNDDWYWLYAAVKLRCLLVTNDEMRDHIFELLGSDFFIKWKERHQVRYTFVKGKLELQMPPLFSVVIQESENGSWHVPVAGNGNDSPQSWLCVSRPRACDALEEDSCMEGSKDSNDICCNSKLLSFGRPESLTSCKNKLQSQASFQESDNKITALTCKRKERSPSPSYLHVPCDQRHQ

SEQ ID NO: 191 - protein, 546 aa, Artificial Sequence
  mutant Populus trichocarpa 3b
MSNQTPESQFSYNLNFYSKSKDLHSAISLYDTAISQNTRLNQHNFNTLLYLCSISLNDPSTKDLSLQYGFRVFDHMVSNGIKPNEASITAVARLAAAKGDGDYAFDLVKNIGVYNELPRLRTYDPALFCYCEKLEGDKAYEVEEHMRRIGVGLEEGEIAALLKVSVETRREERVYGYLQKLRKMVRCVREETAKVIEHWFEVFEGNGVELDVGLVREAVSRNGGGWHGLGWIGKEKWVVRRGSVNAGGKCCCCGEQLVSVDIDDDETERFAESVAGLAMEREVKANFSEFQNWLEKHANYEAIMDGANIGLYQQNFAEGGFSFSQLDAVIKDLYNQSGKKQPLIILHNKRLRALLQNPSTRELIQEWIEKDVLYTTPHGSNDDWYWLYAAVKLRCWLVTNDEMRDHIFELLGSDFFVKWKERHQVRYTFVKGNLELQMPPLFSIVIQESENGSWHVPVAGDGNDSPQSWLCVSRPSSCDALKEASCMEESKDSNDSRCNSKLPTFGRPESLASCKHKLHSRDSFQESDDKITALTGKRKERSPSPS

SEQ ID NO: 192 - protein, 506 aa, Artificial Sequence
  mutant Eucalyptus_1
MSRKAKKKERMELPESLLKFKLDMCSRHGKLVEALQLYDEARENGVPLSHYHYNVMLYLCSSAGSGSLGQGGSENDENLKELGMRRGFEIFRQMAIDNVAPNEATFTNAARLATAREDPEMAFDLVKKMKNFGIPPRLRSYGPALFGFCKKGNADKAYEVDEHMVDCGVLAEESELSALLKVSMDAKKADKVYELLHRIRATVRQVSESSAQIVEDWFKSDFAASVGVESWDINKIKEGVVKGGGGWHGQGWLGSGNWRIRRTQMDKKGVCQSCGEKLVCIDIDPKETENFASSLTKLAREKEAKAGFTKFQAWIQKHGPFDAVVDGANAGLVNQKRFNFFQVNFIMNKLREMSPSKRFPLLILHKRRVHGKPDKDPRNQKLLETWENSGALYPTPLGSDDDWYWLYAAVHWNCLLVTNDEMRDHLFQLLGSSFFPRWKEKHQVRISVSKRGIQLHKPPPYSIVIQESENGNWHVPTVTGDDLETPRQWLCATRSKNVSNPLLNLF

SEQ ID NO: 193 - protein, 665 aa, Artificial Sequence
  mutant Eucalyptus_2
MYSKSGDFLGAVQWYDSARKEGIQLGQYHYAVLLYLCASAAVGVVQPAKSGSGARTLNRLDLLNEDVTTNRVKFGEEDEVVSNDLLSIGARGIEGNAGKMDLRSNRTNGNVEYTDEIKSIRQNFNGFPKPNAHVSDRLNDVGKTKGDSSDIENEAIDQEDQVVIFDENLKKFAVEKGFEIYREMCSDKVPMNEATLTSVARMAMSIGDGDMAFDMVKQMKPMGINPRLRSYGPALSTFCNSGDIEKAFEVENHMLKNGVYPEEPELQALLRLSIAVGRGDKVYYLLHKLRTSVRKVSPYTADLIEDWFKGKVASDIREAIKNHGGGWHGKGWLGRGKWSVSRASVGSDGSCKCCGEKLATIDLDPWETEKFAKSVAALALKREKNSSFQKFQKWLDYFGPFEAVIDGANAGLFSQQRFLPAKVNAVVNGIRQKLPLRRWPLIILHNRHITGKKMEVPVNRAIIDKWRNKDALYLTPTGSNDDWYWLYAAIKFKCLIVTNDEMRDHTFQLLGNDFFPKWKERHQVRFSFSDAGPEFHMPPPCSVVIQESENGHWHIPILLEHEYEADRTWLCVTRASSGLATRPEDLQLHQWSEQHVMEDKDPQDGVDPFSETLQPNHDNVRKSPPETHQNLKNIFAAAVSSYDSTLLSELDTAERCGNCIIDFQI

SEQ ID NO: 194 - protein, 505 aa, Artificial Sequence
  mutant Eucalyptus_3
MNAVAEASLKESALDHGFRIHAHMESCGVAPSEATVTAVARLAAARGDGDYAFGLVRKMGERGIAPRLRTYDPALYCFCGALEADKAYEVEEHMRSAGLSLEEPELSALLRVSAETGREERVYEYLHKLRDCVRWVSEETAVSIESWFSGEKAVGVGDVNYDRSHVKDVVLRNGGGFHGLGWIGKGNWVVRRGNVDENGVCSCCGERLACVDIDDMETESFASSIAALACERESKANFSDFQDWLEKHADYEAIVDGANIGLYQQNFADGGFSVPQLDAVVKELYGRSKGKWPLVILHNKRLKGLLESSPHKQLLQEWIDKGVLYTTPSGSNDDWYWLYAAVRLRCLLLTNDEMRDHIFELLGSKFFSKWKERHQVRYTFVKGSPVLIMPLPFSPVIQESETGSWHVPVKDDSNEEIVRTWVCITRPSVCKSSNGVLASKESPEGSNNFLNDHKLLNSSKPGTTTEDSNALGSIGFSQDCVNNTNIMTRKRKERSSSPPPLASSS

SEQ ID NO: 195 - protein, 520 aa, Artificial Sequence
  mutant Ricinus communis 1
MSSALSAKPQIHESSALAAKKVSNKAKKKARQESPEGVLRSKIDNCSKHGNLVEALRLYDEARINGVQLNQHHYNVLLYLCSSGSSVELGGNGANEKASNMQFKRGFEIFQQMVIDKVPPNEATFTNAARLAIAMEDPEMAFDLIKQMKCFDILPKLRSYGPALFGFCKKGMADRAYAVDAHMAESGVMPEEPELSALLKLSVDIKRADKVYEMLHRLRATVRQVTETTIDIIEAWFKSEDASKIGEEKWDVSKVREGVVRGGGGWHGQGWLGSGQWRVVRTQIDAKAVCNSCSEKLVCIDIDPSETENFATSLTNLACQREVKADFVRFQEWLQKHGPFDAVIDGANLGLINQTNFSFRQLNTVVSKLRQMSPSKRLPLIILHRSRVTGGPAQNPNNMKLLEFWKKSGALYATPTGSNDDWYWLYAAVSCNCLLVTNDEMRDHLFQLLGTSFFPRWKEKHQVRLSVSRSGIALHMPPPYSIVIQESENGSWHVPTISEDDLETPRQWLCASRTRNKVVL

SEQ ID NO: 196 - protein, 721 aa, Artificial Sequence
  mutant Ricinus communis 2
MSTRYKGATKERKYMDNQLISGRMEGDPQEVKFRLELDKCCKRGDVMAAIQLYDLAQREGIKMGQYHYTVLLYLCSSAAAGVVQPGKSGRGGRASNSLAVSDEVSSASVVEFRELRDKNDVDATESDTKILNNVNKVIDSGRNPGSKDKMELKSSNRFNDSDSTSNERKNLSQIPIVVSDSNYQQLECLSFPAKNNDGKYHDGNGILVSEDIKKYALERGFEIYEKMCMDKIPMNEATLTAVARIAMSMGNGDMAFDMVKQMKLLGLNPRLRSYGPALAAFCSSGDADKAFTVEKHMLDHGVHPEEPELEALLRVSVEAGKGDKVYYLLHKLRTSVRKVSPSTANIIIEWFKSKAASRVGKTKWDKRVVKEAIANGGGGWHGQGWLGKGKWTVSCSSVGVDAFCKSCGKKLATIDLDPTETESFAESVASIAIKREKDSSFQKFQKWLDYYGPFEAVVDGANVGLLGQKRFIPSKINAIANGIRQKLPSKKWPLIVLHNRRVTGHKMDEPVNKSLVEKWKHADALYATPTGSNDDWYWLYAAIKFKCLIVTNDEMRDHTFQLLGNDFFPKWKERHQVHFGFSDAGPVFHMPPSFSVVIQESENGHWHIPIASDTDYEPERAWLCITRAKLPLPRKDSITIKPEESQFVKRSSGQAKLPTKTRVKAKQGTLNHGSDEDNSPEQVYKNLRNILSASGFTDHRTVLSEIEAAEKLGDSVIDFQI

SEQ ID NO: 197 - protein, 543 aa, Artificial Sequence
  mutant Ricinus communis 3
MNQTPESQFNYNLNFYSKSKDLNSAISLYKTAISNKTQLNQHHYNTLLYLCSISLNDPSEKELALQNGFDIFEHMVATGIKRNEASITAIARLAAAKGDGDYAFNLIKNMLVDNQLPRLRTYDPVLFCFCEKLEAFKAYEVEDHIVSMGMNLEELEIAALLKVSVETKNKERVYGYLQKLRKTVRCVKEETAKIVEDWFKDFEVNGKELDVGLVRKAVVKNGGGWHGLGWIEKGKWGVKRGNMDMDGRCCCCGESLACVDIDDLETERFAGSLAGLAMEREVKANFSEFQDWLDKNADYDAIVDGANVGLYQQNFAEGGFSISQLDAVVKELYDRSGKWPLIVLHNKRVRAILENPSQRNLIQEWTEKDILYTTPHGSNDDWYWLYAAVKLKCLLVTNDEMRDHIFELLGSSFFLKWKERHQVRYTFVKGKLKLQMPPPFSVLIQESEKGSWHVPIAGDGNEDSAQSWLCITRSSACYAPDKDEMNIETFETEYQDRILLSPSKANSITGYNDILDSEESFPHSENKPATPTGKRKGRSTSPS

SEQ ID NO: 198 - protein, 529 aa, Artificial Sequence
  mutant Medicago sativa 1
MHTFNRATLPFTTTTINNTLSQTPTSQNNTESTTHPIKLSTKARRKAAQESPVGILQKKLNNCSKTSDVLQALNLYDEARKAHVPLNLDHYNKLLYLCTVQNGDGSFFHLGLQRGFEIFEQMLRDNVEPNEATFTNAARLAAAKEDPEMAFELLKQMKRVGIAPKLRSYGPALYGFCARGDAMKAYEVDDDMIESGVMAEEDELCALLEVSVEVKNEDKVYEILHRLRAVVRQVSESTLKVIEDWFESEYAMKIGKREWDDEEIREGFVRGGGGWHGQGWLGSGEWKVVKTNVDEDGMCLSCSEKLVSIDIDPKETENFAASLSKLAHEKQPKANFNHFQKWLEKNGPFDAVVDGANVGLANIAEFSFKQLDYVVRQLRQLSPSKRLPLIILHVNRVTGGPAQNPNNKRLIENWKKNGVLYATPHGSNDDWYWLYAAVSCKCLLLTNDEMRDHLFQLLGSSFFPRWKEKHQVRVSVSTRGASLVLPPRYSLVIQESANGSWHVPTVVSDEPDIPRKWLCVTRSRKKLIT

SEQ ID NO: 199 - protein, 463 aa, Artificial Sequence
  mutant Medicago sativa 2a
MHRDKRNGIMVSEVVKEYALQRGFEVYENMRMSKVEMNEAALTSVARMAMALSDGDKAFEMVKQMKILGINPRLRSYGPALSTYCNNGEIDKAFDVEKHMLEHGVYPEEPELEALLRVSIRGGKSDRVYYVLHKLRSSVRKVSTTTADLIVDWFKSKIALKVGKRKWDNGLIMKAMQNNGGGWHGTGWLGKGKWQVLQTSVRKDGMCKCCGVQLATIDLDPVETENFAKSVASIAISNEKNSNFQTFQKWLDYYGPFEAVIDAANINAVVNELRQKLPSKKFPLIVLHHRRIKGDKRDVPINKALVDRWNNANVLYATPTGSNDDWYWLYAAIKFKCLLVSNDEMRDHLFQLLGNDFFPKWKERHQVRFGFSDAGLEFYMPPPCSVVIQESEEGHWHIPIEAELNDEAERRWLCITRAKLDMVSGDSSTTSKDEKPLQNGEQAKSVTRKESAKELQYQNLVNH

SEQ ID NO: 200 - protein, 466 aa, Artificial Sequence
  mutant Medicago sativa 2b
MNDKDRDKRNGIMVSEVVKEYALQRGFEVYENMRMSKVEMNEAALTSVARMAMALSDGDKAFEMVKQMKILGINPRLRSYGPALSTYCNNGEIDKAFDVEKHMLEHGVYPEEPELEALLRVSIRGGKSDRVYYVLHKLRSSVRKVSTTTADLIVDWFKSKIALKVGKRKWDNGLIMKAMQNNGGGWHGTGWLGKGKWQVLQTSVRKDGMCKCCGVQLATIDLDPVETENFAKSVASIAISNEKNSNFQTFQKWLDYYGPFEAVIDAANINAVVNELRQKLPSKKFPLIVLHHRRIKGDKRDVPINKALVDRWNNANVLYATPTGSNDDWYWLYAAIKFKCLLVSNDEMRDHLFQLLGNDFFPKWKERHQVRFGFSDAGLEFYMPPPCSVVIQESEEGHWHIPIEAELNDEAERRWLCITRAKLDMVSGDSSTTSKDEKPLQNGEQAKSVTRKESAKELQYQNLVNH

SEQ ID NO: 201 - protein, 422 aa, Artificial Sequence
  mutant Lotus_1
MLYLCSIPHSDSMDSGQVGLERGFEIFQQMMREKVKPNEATFTNAARLAAAKEDPQMAFELLKQMKDVGIAPKLRSYGPALFGFCKRGEFEKACEVDADMIESGLVAEEPELSALLEVSVSAKKEDKVYEILHRLRATVRQVSESSLQIIEDWFNSEYAMKVGEENWDADKVRDGIVRGGGGWHGQGWLGSGQWKVVKTHVNEDGMCLSCGEKLVSIDLDPKETENFATSLSKLACQRETQSNFNNFQKWLKQHGPFDAVVDGANVGLANQHNFSFSQLNNVVKQLRQISPSKRLPLIILHVSRVTGGPAQNPNNKRLLEHWRENGALYATPQGSNDDWFWLYAAVSCKCLLLTNDEMRDHLFQLLGSNFFPRWKEKHIRVSASAGRVSLVMPPRYSIVIQESANGSWHVPTVTSDDDHEIP

SEQ ID NO: 202 - protein, 477 aa, Artificial Sequence
  mutant Lotus_2
MKLKIAFDMCSKRGDIMEALSLYDAARSEGLKLQQHHYTVLLYLCSSAAVGVVQPAKSGSGARTLNAQVELVNHEDNDNSVSVDRNERDFSNGILVSGDVKKYALKRGLEVYESMSQSKVKMNEASLTSVARMAMAIGDGDMAFEMVKQMKSLGINPRLRSYGPALSTFCNNGEIDKAFAVEKHMLEHGVCPEEPELEALLRVSNSIRAGKGDKVYYVLQKLRTSVRKVSPSTAQLIIDWFKSTQASLIMEAIENHGGGWHGQGWLGKGKWRVVHTAIGNDGICKCCGVHLATMIKWLDYYGPFEAVVDGANVALFGQGRFIPSKINAVVNGIRQKLPSKKFPLIILHNRRIKGDKGGEAINGALIDRWNNADALYATPTGSNDDWYWLYVAIKFKCLIITNDEMRDHLFQLLGNDFFPKWKERHQVHFSISDTGPEFYMPPPCSVVIQESEEGHWHIPIETELSNESERRWLCITR

SEQ ID NO: 203 - protein, 513 aa, Artificial Sequence
  mutant Aquilegia_1
MSSTPNVRTPSKRAQNKAQRQSPEGQLRYKLDMCSKDGDLVEALRIYDDARSNKFSLSKHHYNVLLYLCSSSDVLVQENVFNQKDEKSRNLGLRRGFEIFKQMGIDGIAPDEATFTNASRLAAKMEDPEMAFELLKKMMNSNIPPKLRSYEPALFGFCNKGEANKAYEVDAHMLASGVTPEEPQLVALLRVSVNVKNADKVYEIIHRLRASVRQVSDSTAKIIEEWFKSKEAMEVGKESWDVNKVKEGIVKGGGGWHGQGWLGKGEWKVVKTEMDENGVCHCCGERLVCIDIDPLETENFANLLSRLACQREAWANFNQFQNWLKNNGPFDAVIDGANVSLNNGHAFSFFQLNAVVERVREFSPTKRLPLIILHTGRVVGGPANSPKNKALIEQWRRFGALYTAPKGSNDDWYWLYAAVNCKSLLVTNDEMRDHLFQLLGTSFFPRWKEKHQVRYKVSRDGTVLQLPPPYSIVIQESERGGWHIPIASADDVDTPRQWVCASRASTSLNSAIS

SEQ ID NO: 204 - protein, 754 aa, Artificial Sequence
  mutant Aquilegia_2
MCSLEHQHSIKTLNPTTQKEYNYGFFPLKSRDERVGRKAKVSSIVGEKTGKKYRKDVDSRRKREMGSGVSSLGSVEERVEIKSKVADKVVDEKMTKFSKKSNGSSKLRNETSNKNSSGSNADFQVGEGKSRKRRKKEKVETPEFKLKAGLDMCSKRGDLLSAISLYDTAQKEGVKLGQYHYTVLLYLCSSAAVGVIRPAKSGSGSRTSDKLDLMNEVPNENVHVRLDPSTSSHGYPIDSSSESHVLSSNKVQEINNSELEPVKYVIPLGNKTERLANKLFDKTSNTSNGFYTGIDQEDSDREREGNSNQEDHKIQVSEDVKKYALVRGFEIYENLCLEKIPLNEATLTSVARMAMSMGNGDMALEMVNKMKEMGINPRLRSYGPALFTFCKTGDIDNAFMVEEHMLENGVYPEEPELEALLRLSVEAGRGDKVYYLLHKVRNSIRKVSPSTADLIERWFRSKPASTVGERNWDHRLIMEAMENGGGGWHGQGWLGKGRWNSARTFIGTDGVCESCGDKLVTIDLDPTETENFAKSVASIAAKRERKSCFQNFQKWLDYYGPFEAVVDAANVGLYSQRHFSTSKVNAIVNGIRQKLPSKKWPLIVLHNKRITGGRMDEPANKTLVEKWKNADALYATPTGSNDDWYWLYAAIKFKCLLVTNDEMRDHIFQLLGNDFFPRWKERHQVHFNFSDSGPEFIMPPPCSVVIQESEKGHWHIPIESEVASERERTWLCVTRSDPERPGSPKKHKGIYSEE

SEQ ID NO: 205 - protein, 531 aa, Artificial Sequence
  mutant Aquilegia_3
MNLEGQFMYDLGTCSKSNDLAGALSLYEKAISQNLRLNHNHLNTLLYLCSNSLHDLASKDSAIEKGFGIYERMIANNINPTEATITAVARLAAANGDGDFAFELVKSMGKYKIVPRLRTFDPALFAFCEKLEAEKAYEVEELMVSMGIHLEEPEFAVLLKVSSEVGREDKVYLYLHKVRNCTRCVSLVTGEIIESWFNKGLASEVGVSEWDENGIKDAMLKNGGGWHGQGWLGKGKWVVSKSNINLEGCCCSCGERLVCVDIDRAETEKFAESVASLATKREAKSDFRVFQEWLDNHSGYEAIVDGANVSLYQQNFADGGFSISQLEAVVKDLYDRSGKWPLVIMHNKRVSSLMDNPSNLKILEDWKNQGTLYTTPNGSNDDWYWLYAAVKLKCLLVTNDEMRDHIFELFGSNFFLKWKERHRVRFTFLKNNLRLLMPPSYSLVIQESEKGSWHVPIDGECNDELLRTWLCITRPRLHDYSSEVLKSSHSLVLDRPFSNHMSTMNGSHNNESKALSGKRKSRSPSPSKGHP

SEQ ID NO: 206 - protein, 524 aa, Artificial Sequence
  mutant Eutrema halophila 1
MGTRDRRLLLVEHKRHLCTMPVAAKQSQASPSENLSRKARKKAIQQSPETLLKQKLDMCSRNGDAVEALRLYDEAKRNGVQLSQYHYNVLLYVCSLSEAGTESSPNPGLSRGFDIFKQMIVEKVVPNEATFTNGARLAVAKDDPEMAFDMVKQMKAFGIQPKLRSYGPALFGFCRKGDADKAYEVDAHMLESEVVPEEPELTALLRVSMDIKNTDKVYETLQRLRDLVRQVSKPTFDTIEEWFNSEAAAKAGVEKWDLKKIKDGVVSGGGGWHGQGWLGTGKWNVTRTEMDENGVCKCCKDKLVCIDINPVETENFAASLTRLACEKEVKSNFNQFQEWLQRHGPFDAVIDGANMGLVNQRSFSFFQLNNVVQRFQQNSPSKRLPLVILHKSRVIGGPATYPKNRALLEKWKNAGALYATPPGSNDDWYWLYAAVSCKCLLVTNDEMRDHLFQLLGNSFFPRWKEKHQVRISVSREDGLTLHMPPPYSIIIQESEDGTWHVPMSVKDDLQTSRQWLCARRSKTH

SEQ ID NO: 207 - protein, 529 aa, Artificial Sequence
  mutant Eutrema halophila 3a
MNPETNLLFNLNSCSKSKDLSAALALYDAALVSNDVSLSQQHFQTLLYLCSASISDPSLQSLAIDRGYQIFDRMVSSGISPNEASVTSVARLAAAKGDGDYAFKIVKDFVSAGGTSIPRLRTYAPALLCFCEKLEAEKGYEVEEHMDAAGIELEEAEISALLKVSCATSREDKVYRYLHKLRESVGYVCEETLKVIEEWFCGEKAGEFGDNGIGSDAGMLREAILKNGGGWHGHGWIGEGKWIVKKGNVSSTGRCLSCSEQLACVDTNEVETQKFVDSLVSLAMERKSKMNSCETKGDFSEFQDWLEKHGGYEAIVDGANIGLYQQNFADGGFSLPQIEAVVKELYHKSGNNKWPLILLHKKRVKTLLENLTHRNLVEEWINNGVLYATPPGSNDDWYWLYAAAKLKCLLVTNDEMRDHIFELLGNSFFQKWKERHQVRYTFSKGNLKLEMPSSFSVVIQESEKGSWHIPVSCQNIEESSRTWICIRRKSVLDSPKFNEKLATSGNGKILSSCNNNSLLSSCDAGNDQN

SEQ ID NO: 208 - protein, 495 aa, Artificial Sequence
  mutant Eutrema halophila 3b
MPEKNLLINLHSCTKSKDLEAALALYDEAITSGDVRLGQQHFQSLLYLCSASISDPDLETLAIYRGFQIYDRMVSSGISPNESTVTAVARLAAAKGDGDFAFKLVLDIVAGGVSVPRLRTVAPALLCFCERLEARQAYEVEEYMDALGIVLEEVEISALLKVSIGTEQANKFYKYLHKLRENVGCVSEETSKIIEEWFREKASEVRGKVSDIELLRAAVLKNGGGWHGLGWVGEGKWIVKKGNVSPAGKCLSCGEHLACVDANEVETEKFVNSLVALAMERKAKMNSCEPTADFSEFQEWLEKHGDYEAILDGANIGLYQQNFADGGFSLPQLEAVVNELYKKSGNKKWPLILLHKKRVDALLGNPNHRELVEEWINNNVLYTTPPGSNDDWYWLYATAKLKCLLVTNDEMRDHIFELLSTSFFQKWKERHQVRYTYVKGCLKLEMPPPFSVVIQESEKGSWHVPITCQNIEESVRNWICIRRESLYIHSREKIQ

SEQ ID NO: 209 - protein, 475 aa, Artificial Sequence
  mutant Eutrema parvulum 1
MLKQKLDMCSRNGDVLEALRLYDEAKRNSLQLSQYHYNVLLYVCSLSDAETESSSPNPGLSRGFDIFKQMIVEKVVPNEATFTNGARLAVAKDDPEMAFDMVKQMKAFGIQPKLRSYGPALFGFCKKGDADKAYEVDLHMLESEVVPEEPELTALLKVSMDTENAEKVYESLQRLRDLVRQVSKSTFDAIEEWFKSEAAAKAGVEKWDVKKIRNGVVSGGGGWHGQGWLGTGKWNVTRTEMDENGVCKCCKEKLVCIDINPVETENFAASLTRLACQKEVKASFNQFQEWLKRHGPFDAVIDGANMGLVNQRSFSFFQLNNVVQRFQQISPSKRLPLVILHKSRVIGGPATYPKNRALLEKWKNAGALYATPPGSNDDWYWLYAAVSCKCLLVTNDEMRDHLFQLLGTSFFPRWKEKHQVRISVSRENGLTLHMPPPYSIIIQESEDGTWHVPMSVEDDLQTSRQWLCARRSKTL

SEQ ID NO: 210 - protein, 524 aa, Artificial Sequence
  mutant Eutrema parvulum 3a
MNLLFNLNSCSKSKNLSAALALYDAAVTSNEVQLSQQHFQTLVYLCSASISDPSLQTVAIDRGYQIFDHMVSSGISPNEASVTSVARLAAAKGDGDYAFKIVKDFASVGGISIPRLRTYAPALLCFCERLEADKGYEVEEHMDAAGITLEEAEISALLKVSAATGRENKVYRYLHKLREYVGCICEETSKIIEEWFCGEKAGEVSDKEIGADAGLLREAILKNGGGWHGHGWVGEGKWVVKKGNVSSAGRCLSCSQHLACVDTDEVETQKFVDSLVSLAMERKAKMNSCETKVDFSEFQDWLEKHGEYEAIIDGANIGLYQQNFADGGFSLPQLEAVVNELYHNSGDNKWPLILLHKKRVKTLLENPANKNLVEEWINKGVLYATPPGFNDDWYWLYAAAKLKCLLVTNDEMRDHIFELLGNSFFQKWKERHQVRYTFAKGNLKLEMPSPFSVVIQESEKGSWHVPVSCQNNEDSSRTWICISRQSTIHSPKVNGKVETSGNGKIISSCNNSLLSSCDAGINEN

SEQ ID NO: 211 - protein, 487 aa, Artificial Sequence
  mutant Eutrema parvulum 3b
MNLLVNLHSCSKSKDLSAALALYDAAITSGDVRLTQQHFQTLLYLCSASLSDPSLQTLAIDRGFQIFELMVSSGISPNEASVTAVARLAAAKGDGDYAFKVVKDIVAVGGVSVPRLRTYAPALLCFCEILEAEKGYDVEEHMDASGIALEEVEISALLKVSVATGRENKVYRYLHKLREFVGCVSEETSEIIEEWFCREKASKVSGSGIGSDIVLLRAAVLKNGGGWHGLGWVGEGKWIVKKGNVTPAGKCLSCGEHLACVDTNEVETENFVNSLVALAMERKAKMNSSEPMADFSEFQEWLEKHGDYEAILDGANIGLYQQNFADGGFSLPQLEAVVKELYNKSGNKKWPLILLHKKRVNALLENPNHKNLVEGWINNNVLYTTPPGSNDDWYWLYAAAKFKCLLVTNDEMRDHIFELLSTSFFQKWKERHQVRYTFVKGSLKLEMPPPFSVVIQESEKGSWHVPITCQNCEESLRNWICITRQSL

SEQ ID NO: 212 - protein, 513 aa, Artificial Sequence
  mutant Mimulus_1a
MASHYSTTSAEALVQSSTNSGTRMSKKKARREAPEMILRVKLDLCSKDGNLTEALCLYNEARANGVQLNVHHYNVLLYLCCPNRDLSKEDEGNLTMLDRGFEIFKQMGIDKVEPNEATFTNLSRLAAAKEDPRLAFDLVKQMTEHGIVPKLRSYGPALFGFCKKGMADEAYEVDFHMRDNGVLPEETELTALLRVSSEFKKEGKVYEMIHRLRTTVRQVSEETAATITDWFKSKIASEIGEEKWDMEKVRKGFLEGGGGWHGQGWLGKGDWRVVRTTMDESGVCRSCGEKLVCIDIDPKETEKFAELLATLASQKEARTNFAKFQEWLQRQGPFDAVVDGANLGLANKHTFSFSQIARVVNELRQISPSKKLPLIILHQGRVSGGPAQNPNNKRLLESWKKGGSLYATPQGSNDDWYWLYAAVSCKCLLVTNDEMRDHLFNLLGNNFFPRWKEKHQARLKPSGDGLLTLHMPPPYSHVIQESKQGNWHIPTVTGDDLETPRQWICATRTRLHE

SEQ ID NO: 213 - protein, 512 aa, Artificial Sequence
  mutant Mimulus_1b
MSTSSGGQSLLQNERYSVTRRIKKQALRDSPEIMLRVNLDQCSKNGDLDEALRLYHEAKLNNIQLNVYHYNVLLYLCSLRSDDDGEEGLNPETLEKGFEIFKEMIIDRVELNEATFTNVSRLAAAKEDPELAFNLIKKMKDQGIGPKLRSYGPALFGFCKKGMADEAYEVDSHMVDNQVSAEESELSALLKVSSDVKREEKVYEMMHRLRATTRQVSEETAAVVEDWFLSERAAEVGLENWDTGKIKKGVLKGGGGWHGQGWLGGGDWRVVGTTMDEAGVCQSCGEKLVCIDIDPKETENFAKSLSELASKKEATTGFFQFQEWLQRHGPFDAVVDGANVGLANQHTFSFSQIKGVVNRLRELSPSKKLPLVVLHQNRVNGGPAQYPNNKKLLESWKKAGALYATPVGSNDDWYWLYAAVSSKCLLVTNDEMRDHLFNLLGNSFFPRWKEKHQVRLKPSSDGIRLHMPPPYSIVIQESEQGSWHIPTVTEDDLETPRQWLCATRARNSMPTP

SEQ ID NO: 214 - protein, 667 aa, Artificial Sequence
  mutant Mimulus_2
MATSLSEDVAEANSGNDVNADFLSGLSSFAVADDVSNNSHVRNHNRAQKPIEKRVILKDRHAAKIGLNSKSRKQVVSSSSSSSSSSSSSIRFKATHSVNSNLIEHKNNNKVPDKQKEKRRSKKDKIDSPESTLRVGLDMCSKRGDVVGAIKLYELAKKEFIKLGQYHYAVLLYLCSSAATEVKRAALRKGFEIYNEMRLENIPMNEATFTSVARMATAFGDGDMAFDMVKQMKEYGINPRLRSYGPALSIFCSNGDIDNAFKVESHMLEHGVYPEEPELEALLKVSIDAGKSEKVYNVLHKLRTSVRQVSSSTAELIERWFTSKTASRVGKRKWDQNLIIEAMKNGGGGWHGKGWLGKGKWTVSRSPVDSDGLCKCCGKKLVTIDLDPVETENFAKSVASIAAEREKDSSFQKFQKWLDYYGPFEAVVDAANVGLYSQRSFKPSKVNAVVNGIRQMLHCRKWPLIVLHNRRINGGKMEEPFNKALIEKWRTADAIYATPTGSNDDWYWLYAAIKCGCLLVTNDEMRDHLFQLFGNDFFPKWKERHQVRFSFTETGPTFRMPPPCSVVIQETEEGQWHIPIVSESENEDERIWLCCSRSNSSSPSSSSHHQNQESEIPRTQKKKREARISVETVFGESGKRNHRKNNTLLAQLETAEQLGDCAIDFQI

SEQ ID NO: 215 - protein, 491 aa, Artificial Sequence
  mutant Mimulus_3
MSTLDQCSKTKDLTAAISLYESSPSPTLTLGNLNSFLYICSNSLSDPETRQPAIEFGFKLFHHHSDGDNFKPNEATLTALSRLAAARGDGDYAFELAKSVKKYGVAPKLRTFSPALICFCGGAAAAADKAYEVEEYVESVGLHLEEPELAALLKVSIESGKEKKVYEYLHKLRATLREVDESTVAIIESWFSGKNAADVSVVSLDSDRIREANTRNGGGWHGLGFLGNGEWALQRSKIASYGQCCACNEQLVCVDTDTEETEKFAQSVASLAMERELHSNFKEFQDWLEKHSEYETVVDGANIGLYQQNFAEGGFSVTQLDAVVKETHSKSKKWPLVVMHKKRVRSILEDASKRELIEEWLDQGVLYGTPYGSNDDWYWLYAAVKLKCLLVTNDEMRDHIFELIGSNFFSRWKERHQVRYTFTKGGGLKLIMPPSYSLVIQESEKGSWHVPIAGEISDESSRTWLCVTRSGSIDAEEVSGNLIRNGSNNTS

SEQ ID NO: 216 - protein, 440 aa, Artificial Sequence
  mutant Jatropha_1
MARFCSFAHSTTPQIHESSVSGTNKVSRKSNKKARQESPEWVLKWKLDSCSKSGDLVEALRLYDEARSNGIQLTQHHYNVLLYLCSSGSSVELKGDRVVANASDLSFKRGFEIYQQMVTDKVAPNEATFTNVARLAFASEDPEMAFDLVKKMKGFDILPKLRSYGPALFGFCKKGMADRAYEVDTHMAESEVIAEEPELSALLKVSADAKRVEKVYEMLHRLRYTVRQVSDSTIGIIEDWFKSEDASKLGKQNWDVNKVREGIVRGGGGWHGQGWLGSGEWKTVRTKIDEQGICCSCGQKLVCIDIDPRETENFATSLANLACRKEVKADFVLFQYWLYAAVSCKCLLVTNDEMRDHLFQLLGTSFFPRWKEKHQVRVSVSRSGPALHMPPPCSIVIQESENGSWHIPTVTDDLETRRQWLCATRERHNYSDNNLAVSVA

SEQ ID NO: 217 - protein, 525 aa, Artificial Sequence
  mutant Arabidopsis thaliana 1
MGTRDRRLILVERSRHLCTLPLAAAKQSAASPSENLSRKAKKKAIQQSPEALLKQKLDMCSKKGDVLEALRLYDEARRNGVQLSQYHYNVLLYVCSLAEAATESSPNPGLSRGFDIFKQMIVDKVVPNEATFTNGARLAVAKDDPEMAFDMVKQMKAFGIQPRLRSYGPALFGFCRKGDADKAYEVDAHMVESEVVPEEPELAALLKVSMDTKNADKVYKTLQRLRDLVRQVSKSTFDMIEEWFKSEVATKTGVKKWDVKKIRDAVVSGGGGWHGQGWLGTGKWNVKRTEMDENGVCKCCKEKLVCIDINPVETETFAASLTRLACEREVKANFNQFQEWLERHGPFDAVIDGANMGLVNQRSFSFFQLNNTVQRCQQISPSKRLPLVILHKSRVNGGPATYPKNRALLEKWKNAGALYATPPGSNDDWYWLYAAVSCKCLLVTNDEMRDHLFQLLGNSFFPRWKEKHQVRISVTREDGLKLNMPPPYSIVIQESEDGTWHVPMSVEDDLQTSRQWLCAKRSKTP

SEQ ID NO: 218 - protein, 505 aa, Artificial Sequence
  mutant Arabidopsis thaliana 2
MVSRNPETNLLFNLNSCSKSKDLSAALALYDAAITSSEVRLSQQHFQTLLYLCSASITDISLQYLAIDRGFEIFDRMVSSGISPNEASVTSVARLAAAKGNGDYAFKVVKEFVSVGGVSIPRLRTYAPALLCFCEKLEAEKGYEVEEHMEAAGIALEEAEISALLKVSAATGRENKVYRYLHKLREYVGCVSEETLKIIEEWFCGEKAGEVGDNGIGSDVGMLREAVLNNGGGWHGHGWVGEGKWTVKKGNVSSTGRCLSCSEQLACVDTNEVETQKFVDSLVALAMDRKTKMNSCETNVVFSEFQDWLEKHGDYEAIVDGANIGLYQQNFVDGSFSLSQLESVMKELYRESGNNKWPLILLHKRRVKTLLENPTHRNLVEEWISNGVLYATPPGSNDDWYWLYAAAKLKCLLVTNDEMRDHIFELLGSTFFQKWKERHQVRYTFVKGNLKLEMPSPFSVVIQESEKGSWHFPVSCENNEESSRTWMCISRQSILDSPKSNGKIP

SEQ ID NO: 219 - protein, 494 aa, Artificial Sequence
  mutant Arabidopsis thaliana 3
MGNRNPEKSLLINLHSCSKRKDLSAALALYDAAITSSDIRLNQQHFQSLLYLCSAFISDPSLQTVAIDRGFQIFDRMVSSGISPNESSVTAVARLAAAKGDGDYAFKLVKDLVAVGGVSVPRLRTYAPALLCFCDTLEAEKGYEVEDHMDASGIVLEEAEISALLKVSAATGRENKVYRYLQKLRECVGCVSEETSKAIEEWFYGVKASEVSDNGIGSDIELLRAAVLKNGGGWHGLGWVGEGKWIVKKGNVSSAGKCLSCDEHLACVDTNEVETEDFVNSLVTLAMERKAKMNSCEPMADFSEFQEWLEKHGDYEAILDGANIGLYQQNFADGGFSLPQLEAVVKELYNKSGSKKQPLILLHKKRVNALLENPNHRNLVEEWINNNVLYATPPGSNDDWYWLYAAAKLKCLLVTNDEMRDHIFELLSNSFFQKWKERHQVRFTFVKGCLKLEMPPPFSVVIQESEKGSWHVPITSQDKEESLRSWMCITRQSS

SEQ ID NO: 220 - protein, 525 aa, Artificial Sequence
  mutant Arabidopsis lyrata 1
MGTRDRRLILVERSRHLCTMPLAAAKQSAASPSENLSRKAKKKAIQQSPEALLKQKLDMCSKKGDVLEALRLYDEARRNGVQLSQYHYNVLLYVCSLAEAATESSPNPGLSRGFDIFKQMIVDKVVPNEATFTNGARLAVAKDDPEMAFDMVKQMKAFGIQPRLRSYGPALFGFCRKGDAGKAYEVDAHMVESEVVPEEPELAALLKVSMDTKNADKVYEMLQRLRDLVRQVSKSTFDTIEEWFKSEAAAKAGVKKWDVKKIRDAVESGGGGWHGQGWLGTGKWNVKRTEMDENGVCKCCKEKLVCIDINPVETETFAASLTRLACEREVKANFNQFQEWLERHGPFDAVIDGANMGLVNQRSFSFFQLNNTVQRCQQISPSKRLPLVILHKSRVNGGPATYPKNRALLEKWKNAGALYATPPGSNDDWYWLYAAVTYKCLLVTNDEMRDHLFQLLGNSFFPRWKEKHQVRISVSREDGLTLHMPPPYSIVIQESEDGTWHVPMSVEDDLQTSRQWLCAKRSKTP

SEQ ID NO: 221 - protein, 507 aa, Artificial Sequence
  mutant Arabidopsis lyrata 3a
MISRSPETNLLFNLNSCSKSKDLSAALALYDAAVTSSELRLSQQHFQTLVYLCSASISDTSLRSLAIDRGFEIFDRMVSSGISPNEASVTSVARLAAAKGDGDYAFKVVKDFVSVGGVSIPRLRTYAPALLCFCERLDADMGYEVEEHMEAAGIALEEAEILALLKVSAATGRENKVYRYLHKLREYVGCVCEETSKIIEEWFCGEKAGEVSDNGIGSDVGMLREAVLKNGGGWHGHGWVGEGKWTVKKGNVSSTGRCLSCREQLACVDTNEVETQKFVDSLVALAMERKAKMNSCETQVDFSEFQDWLEKHGNYEAIVDGANIGLYQQNFVDGSFSLPQLESVVKELYRESGNNKWPLILLHKRRVRALLENPTHRNLVEEWISNGVLYPTPPGSNDDWYWLYAAAKLKCLLVTNDEMRDHIFELLGSSFFHKWKERHQVRYTFVKGNLKLEMPSPFSVVIQESEKGSWHFPVSCENNEESSRTWMCISRQSVLDSPKSNGKLATS

SEQ ID NO: 222 - protein, 494 aa, Artificial Sequence
  mutant Arabidopsis lyrata 3b
MGSRNPEKSLLINLHSCSKRKDLSAALALYDAAITSSDIRLNQQHFQSLLYLCSAFISDPSLQTLAIDRGFQIFDRMVSSGISPNESSVTAVARLAAAKGDGDYAFKLVKDIVVVGGVSVPRLRTYAPALLCFCESLEAEKGYEVEEHMDASGIMLEEAEISALLKVSAATGRENKVYRYLHKLRECIGCVSEETSKTIEEWFYGVKASEISDKTIGCDIELLRAAVSKNGGGWHGLGWVGEGKWIVKKGNVSPAGKCLSCGEHLACVDTNEVETENFVNSLVALAMERKAKMNSCEPMADFSEFQEWLEKHGDYEAILDGANIGLYQQNFADGGFSLPQLEAVVKELYNKSGNKKQPLVLLHKKRVNALLGNPNHRNLVEEWIDNNVLYATPPGSNDDWYWLYAAAKLKCLLVTNDEMRDHIFELLSNSFFEKWKERHQVRFTFVKGCLKLEMPPPFSVVIQESEKGSWHIPIKSQDNEESSRSWMCITRQSL

SEQ ID NO: 223 - protein, 541 aa, Artificial Sequence
  mutant Brachypodium_1
MLRRSSVPLARRRRHSYSSTSTALDDAPNNSPSPTLPGPGPPPAAGGGEGKASRRRRSRDSPEGLLKHKLDMCSRDGDLPTALALYDAALDPASSPPVPLSIHHYNCLLYLCSNAAATASDPDAASRGFEIFARMEAQGVEPNEATLTSVARLAAARRDPAMAFSVVRRMADAGIPPRLRTYGPALFAYCDAGDADGASEVEAHMDAGGVLPEETELAALLRVNADKGRADEVYRVLHRTRVLARQVCETTAQVIEAWFRSDAASQAGVDKWDAKKVKEGVVKGGGGWHGQGWLGKGQWDVERSEMDKNGKCQRCGEKLVCIDIDPSETENFAKSLTELACKREVRDDFLRFQGWLRRHGPFDAVIDAANIGLYNSKAFSFSQVNSVVNGIQRVTKSKKLPLIILHRSRVHCGPAIVPHNQKLIEGWRSAGALYSTPPGSNDDWYWLYAAVSCRSLLVTNDEMRDHLFQLLGTSFFPRWKEKHQVRLTYSGRGPTFHLPPPYSIVTQESEAGRWHVPTTTGDDIENPRQWICAIRKSQRRD

SEQ ID NO: 224 - protein, 689 aa, Artificial Sequence
  mutant Brachypodium_2
MLDVLPLRDRNPGGVANGGTPRTEEGAAGSPVVSCTAAQGDVTREVEASVSSGHGRNRTRRWRRGDSRLVLGEGTDRDVKERGWRGGPARTGESEGRRRDRRWTRGGMRVQESGKDGNLGNLSPRGEDRGGNLKRGKRLKSSEQGVMLRVALDLCSKRGDVIGAINLYDSAVKEGIRMGQHHYNVLLYLCSSAALGIVQPAKSGSAGKLDPASVESSGHPEDSNVPEGHVQNQEGNETILFPSVQIGSSIPVSDEIREYARTRGFEIFEKMCSEKERVAMSKAALTGVARMATSMGNGDMAFEIVKQMKELGITPKLRSYGPALTAFCDSGNVEKAFEVEAHMLESGVTPEEPELEMLLRASVVARRGDRVYYLLHKFRNTVRQVSPSTAEQIEAWFRSSTASKVGKRKWDACALAKEIENHGGGWHGLGWLGRGKWTITRSHIDKNGVCLACGGKLAIIDLDPKETEDFATLVATLALKRERTSNFDNFQKWLDDHGPFEAVMDAANVGLFSHRHLSVSKVNAVADAIQKRFPSRKWPLIVVHNRHLTGKHMKNPANHKWVENWKRADIIYETPTGSNDDWYWLYAAIRWKCLIITNDEMRDHTFQLLEKDFFPKWKERHQVRFSFGDSCVTFQMPPPCSVVIQESEKGHWHIPLSEESLLEEERTWLCVMRRSSQALYNEAGVNSDL

SEQ ID NO: 225 - protein, 484 aa, Artificial Sequence
  mutant Brachypodium_3
MGPNSDLSRTLTDCTRRGDAAAAMAAFDAAIVSGGPEDLRFAAHQYNQLLHLLASADRSSFPGGHPAVAASARRVFAHMLEATTAAPAEATITSLARVIASDPGGGDEAFELVATMRERYGLAPRLRSYGPVLAAFRRTGEAGKAYAVEAHMAASAVSPEEPELAALLDVSAKAGDADKVYEYMHKLRRAVACVSLETAEVLEGWFQSEKAAMAGKAEWDAQQVKDAIVANGGGCHQLGWLQNGPWVVRRATVGTDGECGGCGCCLASVDIDMEETQTFADSVSGLALERETKANFSHFQEWLEAHQEYEAIVDGANIALYQQNFADGGFSLVQLDAVVTELRDRYSGKWPLVILHNKRIAKLMENPSDRHLIETWRANGALYTSPSGSNDDWYWLYAAIGLNCLLVTNDEMRDHIFELLGSSFFHKWKQRHRVKYTFNKGKAVLLMPPPYSSEIQESETGSWHVPIEEKSGDERVRTWLCIGR

SEQ ID NO: 226 - protein, 529 aa, Artificial Sequence
  mutant Physcomitrella patens 1
MDPAESELRRSIDMCSKHADAMGAIEIYDKVVAEGKMSFNQYSYNVLLYLCSSGATVVLTDEQKQLCLQRGFAVYEAMKLQGVPPNEATFTAVARLAVAKDDGDLAFDMVKQMAKAKLSPRLRSYSPALHTYCKLKNIEKAFEVDEHMLAAGVQPEESELEALLKLTADAGLEDKVYPLLHRIRTTVRGLSPSTAGVVQQWFESSAGANAGKSNWNSLPSQETVKAAYESRGGGWHGLGWLGRGSWEVKPSELDANGVCQECGEQLVTIDIDPKETVMFAKSLSELACQREGKSNEFKKFQGWLDRHGPFDVIVDGANVGLFNQNFGEGGFNFHQLNSVVKGIKEKVGSKREPLILLHHRRTRGGPASSSFAIKILNKWQETHAIYTTPTGSNDDWYWLFAAVKYKCILVTNDEMRDHLFQLLGNDFFPRWKERHQVRFSLSREGPVFHMPPPYSMLIQESVSGSWHIPKSGGEDVSAPVKWLCVTRTGQPNPEILKVEEKLNHLLAGAGETGPDSKPVEEANSELKQT

SEQ ID NO: 227 - protein, 478 aa, Artificial Sequence
  mutant Physcomitrella patens 2
MKHADVKQALEIYDKTCKEGKIAFNQYNYNIILYLCSSAATDSLKPQKKQRILYMKRGFEVYEAMKSQGVPPNEATFTAVARLAVAKEDGDLAFDMVKQMAEANLSPRLRSYAPALYTYCKLKNHKKAFEVDDHMKKSGVALEESELEALLKVSVGAGLEDKVYSLLHRLRTTVRDVSPSAVEVIQQWFTSSAAATAGKSNWEHLPGPEYVKKATESCGGGWHGLGWLGRGTWEVKSSVVDDHGVCQECGEPLATIDLDPQETEMFAQSLSRMACQREAKNNEFKKFQGWLDRHGPFDAIVDGANVGLYNSNTPNGGFNFYQLNSVVTGIQKRLGLKREPLILLHHRRTKGGPADSSFAARMLSNWKENNSIYTTPTGSNDDWYWLYAAVRFRCVLVTNDEMRDHLFSLLGNDFFPKWKERHQVVRYTINREGLVFHMPPPFSTVIQESHKGSWHVPKSGKNDEDVLVPREWLCVTRT

SEQ ID NO: 228 - protein, 503 aa, Artificial Sequence
  mutant Physcomitrella patens 3
MDSAESELRRSIDMCSKFADVMGAIEIYDKVVAEGKVAFNQYTYNVLLYLCSSAATEVVVTDEERRLCLERGFVIYEAMKLQEVPPNEATFTAVARLAVAKEDGDLAFDMVKQMANAKLSPRLRSYSPALHIYCKLKNFEKAFEVEEHMLAAGVQAEESELEALLQLATDFGLEYKVYSLLHRIRTTVRGLSPSCAGVVQQWFESSPAASAGKSNWDSLPSPKTVKAAYESRGGGWHGLGWLGRGNWEVKSSVLDTGGVCQECGQQLVTIDIDPNETEMFAKSLSELACQREGKNNEFKKFQAWLNRHGPFDAIVDGANVGLFNQNFVDGGFNFHQLNSVVKGIKEKIGSKRNPLILLHHRRTRGGPANSPHAIKMLKRWQEAHAIFTTPTGSNDDWYWLYAAVQYKCVLVTNDEMRDHLFHLLGNDFFPKWKERHQVRFSMSKEGPVYHMPPPYSILIQESVSGSWHIPKSGNDVSQPGEWLCVTRPGHAKADDMKEEKLKE

SEQ ID NO: 229 - protein, 494 aa, Artificial Sequence
  mutant Selaginella moellendorffii 1
MVEEQERRASSPSPRKKKFNLVSEVRFTLDTCSKFGDVNGALSAYSSNREAVKFDLYNYNVLLYLCSSAALGEMMDGFLRKGLEIFEQMQAENVAPNEATFTALARLSVAKRDGDLAFEIVKAMIAAKIPPKLRCYGPALYVYFKRNDPEKAFEVYNHMLVHGVQPEEAELEVLLHLSSKACLGDRVYLLLHHLRETVRDVSQSTVSVIERWFKSDFAGRVTGNSLPGDFDVRCSSLAKGGGWHGLGWLGQGRWNVGYTSLTAEGVCCRCNEQMVTIDITPEDTDVFAKCIASLAFKRESNNSFGIFKDWLDRNGPFETVVDGANVGFYNQRFNGELNFAQLETVVADVQRRSGKWPLIVLHVGRTMKGSGRSSYAQQLLRHWSNAKALYIAPAGSNDDWYWLYAAVKCKSLLVSNDEMRDHIFQLLGREFFPTWKERHQVRFHVTKHGPVFHMPPPYSIIIQETERGSWHIPVSGGDDISSPRKWLCVTRGST

SEQ ID NO: 230 - protein, 488 aa, Artificial Sequence
  mutant Selaginella moellendorffii 2
MFTPDSELRFKLESCSKVGDVTGALDIYDSSKDQGVKLSQYHYNVLLYLCSSAALGVILALDRGLEIYERMKLEGISANEAAFTSIARLAVAKRDGDLAFSLVKEMTTSGITPKLRSYGPALYTYFKSNRVDKAFEVDDHMRSFGVQPEEMELQILLELSLKAGQEQRVYSVLHRLRRSVREVSPSTATTIERWFSSDAASSSGSDKKYDDEDVRRALAAQGGGGLELGWIGSGRWSVKRTALDASGVCESCRHKMAAVDLNAEETNRFAENLAALACEKERDANSFKEFQEWMAEHGPFDAIVDGANVALFNQNFSAGGFSFSQLNSVVTELSNQHGKSPLVILHKRRVTGGPAASPQSQELLKQWTAANALYTAATGSNDDWYWLYAAVTCKCLLVSNDEMRDHLFQMLGNDLFPRWKERHQVKLRALSYNPFFDMPPPYSTVIQECENGSWHFPISRGNDEDDEAEEPHKQPRSWLCIRRDEETK

SEQ ID NO: 231 - DNA, 1000 bp, Arabidopsis thaliana
ttcatagtcatggcattagcttctgttatcggagtcggtttggatcttgtgttggcttataggactaaggagatttacgctaagattcacgctagcaagaagtcaaagaaatctggtggtagccttagttaagacactgtatatctagttccggtgcactacattgttttcagatgctgattttgtatacatgatacaatatcggattcaagatattgttgaacaaaatttcaagtaccagagatcattgttgtagtagcatcgccaatgtatttttttgtctttccgagatttgttcaaaattatataaatgtatgacattttgatagtccaattccaattattttctaagattttatttagttacatatatatatactaagtggttaataatacacaatataatgcagaaaatcaccaatcttgtcacttttcagtcacttgtgaattaatgggcaattaatagatgggaactcgaatatgaccataataagaatttttgtggaaaattaagtgggatcaacaatgggatcactcgagaaccagctcacttacaagtgaatcgaaaactgaaccaagattacgctaaaccgggatcgacaattgaaaacccggttcaccttttaaatctattctgctcagtgagtagccgccgccgtggtctttgtcgaattcgtggtctctcctccacgcatcgacgttacgccaccatctaatctctttaaacctccgtcagctggtttatctcgccggcctcgtttacttcaaacaaggtaaggtctttcatctttgttaaggttttaggaactgaaactgttattggttttgaattggaatgaatactcaggagaactagaatagttagccaatccatagcaactctataatttgtatgtttctgttcacttttcaagaaaaagttcataatttttttgattcagggtttagggtttcatctaccactttctaccaatgcaaagcttgtaactttgaggtatac

SEQ ID NO: 232 - protein, 116 aa, Arabidopsis thaliana
TAGCTGCACCAGCTTATTGAGTTCATGTATCATTTGTTATGAGTTTTCATTCTTTGTCCTTTGAAGATTAACACAAAAAACGTTCATTGGTTCTATAATAAGGGACTGAACTTTTC

SEQ ID NO: 233 - DNA, 1518 bp, Artificial Sequence
  AtCytoRP2 cDNA
atggtaagcagaaacccagaaacaaatctcctcttcaatctcaattcatgctccaagtccaaggacctctcagctgcattagcactttatgatgcagccatcacttccagtgaagtacgtctcagccagcaacattttcaaacgcttctgtacctatgctcagcttccattactgacatatctcttcaataccttgccattgaccgtggtttcgagatttttgatcgtatggttagttcggggataagtcctaatgaggcatctgttacttcagtggctagactggctgctgctaaaggtaatggtgattatgctttcaaggttgttaaggagtttgtttctgttggaggtgtgtcgattcctcgtctgaggacatatgcgccggctttgctctgtttctgcgagaagttggaggctgaaaagggttatgaggtagaagagcacatggaagctgcaggtattgcattggaggaggcagagatatcggctttgttgaaggtaagtgctgccacgggtcgagaaaacaaggtttatagatatttacataagttgagggaatatgttggctgcgttagtgaagaaactttgaaaattattgaggaatggttctgtggagaaaaagctggtgaggttggtgataatggaattggttctgatgttgggatgcttagagaagctgttttgaataatggaggtgggtggcacgggcatgggtgggttggggagggtaaatggactgtaaagaaaggtaatgttagctcaacaggaagatgtttgagctgcagtgagcagttagcttgtgtagataccaatgaggtagaaacacagaagtttgtggattctttggtggctttggctatggataggaagacaaagatgaattcatgtgagacaaatgtggtcttcagcgagtttcaggactggcttgagaaacatggagattacgaagctatagtagatggagcaaatattgggctctaccaacaaaattttgtagatggcagtttcagtctttcacagcttgaatctgtgatgaaggaactttaccgtgaaagtggtaataacaaatggcccctaattctattgcacaagagacgggtcaagacgcttttagaaaacccaactcaccggaatctggttgaagaatggattagtaacggtgtcctgtatgcaactccaccaggttccaatgatgattggtattggctgtatgctgctgctaagctcaagtgtttgcttgtgacaaatgatgagatgagagaccacatttttgaactcttagggagtacttttttccaaaagtggaaagaaagacatcaggtccggtatacttttgtgaaaggtaacctgaagcttgaaatgccgtctcctttttcggttgtcattcaggaatcagagaaagggtcatggcatttcccggtctcatgcgaaaacaatgaagagtcttcaagaacttggatgtgtattagcagacaaagtattttagattcacctaagagtaatgggaagattccttag

SEQ ID NO: 234 - DNA, 2636 bp, Artificial Sequence
  CytoRP sequence cloned in pGWB13 vector
ttcatagtcatggcattagcttctgttatcggagtcggtttggatcttgtgttggcttataggactaaggagatttacgctaagattcacgctagcaagaagtcaaagaaatctggtggtagccttagttaagacactgtatatctagttccggtgcactacattgttttcagatgctgattttgtatacatgatacaatatcggattcaagatattgttgaacaaaatttcaagtaccagagatcattgttgtagtagcatcgccaatgtatttttttgtctttccgagatttgttcaaaattatataaatgtatgacattttgatagtccaattccaattattttctaagattttatttagttacatatatatatactaagtggttaataatacacaatataatgcagaaaatcaccaatcttgtcacttttcagtcacttgtgaattaatgggcaattaatagatgggaactcgaatatgaccataataagaatttttgtggaaaattaagtgggatcaacaatgggatcactcgagaaccagctcacttacaagtgaatcgaaaactgaaccaagattacgctaaaccgggatcgacaattgaaaacccggttcaccttttaaatctattctgctcagtgagtagccgccgccgtggtctttgtcgaattcgtggtctctcctccacgcatcgacgttacgccaccatctaatctctttaaacctccgtcagctggtttatctcgccggcctcgtttacttcaaacaaggtaaggtctttcatctttgttaaggttttaggaactgaaactgttattggttttgaattggaatgaatactcaggagaactagaatagttagccaatccatagcaactctataatttgtatgtttctgttcacttttcaagaaaaagttcataatttttttgattcagggtttagggtttcatctaccactttctaccaatgcaaagcttgtaactttgaggtatacatggtaagcagaaacccagaaacaaatctcctcttcaatctcaattcatgctccaagtccaaggacctctcagctgcattagcactttatgatgcagccatcacttccagtgaagtacgtctcagccagcaacattttcaaacgcttctgtacctatgctcagcttccattactgacatatctcttcaataccttgccattgaccgtggtttcgagatttttgatcgtatggttagttcggggataagtcctaatgaggcatctgttacttcagtggctagactggctgctgctaaaggtaatggtgattatgctttcaaggttgttaaggagtttgtttctgttggaggtgtgtcgattcctcgtctgaggacatatgcgccggctttgctctgtttctgcgagaagttggaggctgaaaagggttatgaggtagaagagcacatggaagctgcaggtattgcattggaggaggcagagatatcggctttgttgaaggtaagtgctgccacgggtcgagaaaacaaggtttatagatatttacataagttgagggaatatgttggctgcgttagtgaagaaactttgaaaattattgaggaatggttctgtggagaaaaagctggtgaggttggtgataatggaattggttctgatgttgggatgcttagagaagctgttttgaataatggaggtgggtggcacgggcatgggtgggttggggagggtaaatggactgtaaagaaaggtaatgttagctcaacaggaagatgtttgagctgcagtgagcagttagcttgtgtagataccaatgaggtagaaacacagaagtttgtggattctttggtggctttggctatggataggaagacaaagatgaattcatgtgagacaaatgtggtcttcagcgagtttcaggactggcttgagaaacatggagattacgaagctatagtagatggagcaaatattgggctctaccaacaaaattttgtagatggcagtttcagtctttcacagcttgaatctgtgatgaaggaactttaccgtgaaagtggtaataacaaatggcccctaattctattgcacaagagacgggtcaagacgcttttagaaaacccaactcaccggaatctggttgaagaatggattagtaacggtgtcctgtatgcaactccaccaggttccaatgatgattggtattggctgtatgctgctgctaagctcaagtgtttgcttgtgacaaatgatgagatgagagaccacatttttgaactcttagggagtacttttttccaaaagtggaaagaaagacatcaggtccggtatacttttgtgaaaggtaacctgaagcttgaaatgccgtctcctttttcggttgtcattcaggaatcagagaaagggtcatggcatttcccggtctcatgcgaaaacaatgaagagtcttcaagaacttggatgtgtattagcagacaaagtattttagattcacctaagagtaatgggaagattccttagtagctgcaccagcttattgagttcatgtatcatttgttatgagttttcattctttgtcctttgaagattaacacaaaaaacgttcattggttctataataagggactgaacttttctc

SEQ ID NO: 235 - DNA, 22 bp, Artificial Sequence
  P2-5'UTR-F
ttcatagtcatggcattagctt

SEQ ID NO: 236 - DNA, 21 bp, Artificial Sequence
  P2-R
tgaaaatgttgctggctgaga

SEQ ID NO: 237 - DNA, 111 bp, Turnip yellow mosaic virus
cctaagttctcgatctttaaaatcgttagctcgccagttagcgaggtctgtccccacacgacagataatcgggtgcaactcccgcccctcttccgagggtcatcggaacca

SEQ ID NO: 238 - DNA, 130 bp, Tobacco mosaic virus
tttccctccacttaaatcgaagggttgtgtcttggatcgcgcgggtcaaatgtatatggttcatatacatccgcaggcacgtaataaagcgaggggttcgaatccccccgttacccccggtaggggccca

SEQ ID NO: 239 - DNA, 157 bp, Brome mosaic virus
gcagacctcttacaagagtgtctaggtgcctttgagagttactctttgctctcttcgcaagaacccttaggggttcgtgcatgggcttgcatagcaagtcttagaatgcgggtaccgtacagtgttgaaaaacactgtaaatctctaaaagagacca

SEQ ID NO: 240 - DNA, 1466 bp, Nicotiana tabacum
ccatggcgcctgaaagtgtgctgcgccataagctagaccagtgttcaaaacacggtgacttacaggaagcccttcgcctttatgaagaagctaagttaaacaacatttcactcagtgttcatcattataatgtgttgctttatctttgttctgcttcttgtaccaaggaatttggtattgaaaaaggatttgagattttcaaacagatgggtgtaaatggtgttactcctaatgaggccacgttcactagtgctgctagattggcggttgctaagcaagacccagaaatggcttttgatatagtgaagaaaatgaagagttctggtgttcctccgaagttaagatcttatgggccagcattgtttgggttttgtgataagggaatggctgataaggcttatgaagttgacgtacatatgggggaatcaggggttgtggctgaggaagcagagctttctgcactgttaaaagttagttctttgtccgaaagggctgataaagtatatgagacgatgcatagattaagggcaaatgtaaggcaggtgtgtgaagagactgctggtgtgatagaggattggtttaactctgaatgtgctgcagagattggggtggagaattgggatgttgggaaagtgaaggaaggtgttgtgaaaggagggggtggttcgcatggacaaggctggttgggaaagggaaattggtccgtggtgagagccgagatggatagctctggagtttgtagttcgtgtggtgaaaagcttgtgtgcattgacattgatcccaaggagacagagaactttgctaattccttggcaaaattggcttgtgaaagagaagttaaggctaattttgtgcaatttcaggagtggcttcagaagcacggtccattcgatgctgtggtggatggtgcaaatgttggccttattactcaacgaagttttaatttctctcagctcagaaatgttgtcaataaattaagacagatgagtaaatcaaacaaacttccgctagttattttgcacaaaagtcgtgcaactggtggtcctgctcaacatcctaataacaagaagttgttagaaagctggaaaaaagcgggtgcactttatgccactccacatggttcaaatgatgattggtactggttatacgctgctgtcagttctaaaggtttgcttttgacaaatgatgagatgagagaccacttgttccaactgttgggcactagctttttccccagatggaaggaaaaacatcagatccggatgacagcttcaagagatgacggacttgagctccatatgccaccaccttattcaattgttattcaggagtccgagcatggttgttggcatgtgccaactgttattggagatgacattgagatgccaagacagtgggtatgtgcaaccaggagaaaagcactgcactctctctttcaaccaactggggaatcaaatcatctcgag

SEQ ID NO: 241 - DNA, 26 bp, Artificial Sequence
  Primer
taaccatggcgcctgaaagtgtgctg

SEQ ID NO: 242 - DNA, 29 bp, Artificial Sequence
  Primer
taactcgagatgatttgattccccagttg

SEQ ID NO: 243 - DNA, 240 bp, Artificial Sequence
  NtPRORP1 (genome T) gene fragment
  CDS (1)..(240)
  misc_feature (1)..(201): deleted part of NtPRORP1 (genome T) gene
atggtctttcgtcgcatgggtcatttttcaccttgtctttctaaaacctcacccttcttctctcttctcacgaaaaccccttatccatttcatcttccccatactatccacttcttcaaaccaattcataccaaattcccacatacatatcccttttccatgaaccaaaagacccatctcgccaagaaagcccggcgtgacgcgcctgaaagtgtgctgcgccataagctagaccagtgt

SEQ ID NO: 244 - protein, 80 aa, Artificial Sequence
  Synthetic Construct
MVFRRMGHFSPCLSKTSPFFSLLTKTPYPFHLPHTIHFFKPIHTKFPHTYPFSMNQKTHLAKKARRDAPESVLRHKLDQC

SEQ ID NO: 245 - DNA, 1583 bp, Cucumis sativus
ccatgggccaatcccctgaagtcaagttccagttagacctcactgactgttcgaggaggaaagatttactttcggccataactctctgcgaaactgcagtttcggagaagttgaaattcaatcagcagcactttaatactctcctctacctgtgttctaccgctatttctgacccgtccttgaaagaatctgccgtaagttttgggtttcgtgtatataatctcttgcaatccattggtgttattcccaatgaagctacagtcactgctgttgcaaggctcgccgcagcaaaaagggacggcgattctgcatttgaattggtgaaaacaattgggaaatataaagttacgcccaggttgcgcacttatgatcctgcattgatttgtttctgtgagaatttggaggtggataaggcttatgaggtggaacaacacatgaattctgctggggtggagttagaggaacctcaaatttctgcccttttgaagctgagttcagacacaggaaaagaggataaagtgtacgagtatttgcacaaattaagacgttttgtgaagtgtgttagtgagtctactgcaaagataattgaaggttggttttgtagtgaaaaggcctctgatattggtgaatcgactatggatatcggtctgattagggaagcaattttaagtaatggagggggttggcatggaaaggggtggattggtaagggaaattgggtggtgaaaagaacaaatgtttattccagtggcaaatgctgttgttgtgctcaacaattggttggtgtcgatattagttgtgctgagactgaaaattttgctcagtctttggctgctctcgccattgaaagagaggctcaaccgaattttataagctttcaggaatggttagaagtacataatcattgtgatgctattgttgatggagcaaatgttggcctctaccaacagaattttgcagattctggatttaatctttctcaggttgaggccgttgtcaaagaattatgtaagatgagcggggggaaatggccattagttctctggcacaataaacgcaccagggcttcattggataattcttcacatagaaaagttgtcgaggaatggatagacaaaggtgttctttattctacgcccattggctcaaacgacgattggtattggctttatgccgctgtaaaattgaagtgcttacttgtcacaaatgatgagatgcgagatcatatttttgaacttttgggaaacgacttatttctcaggtggaaggagaaacatcaaattcgttacacttttgttaagggtcaactgagacttgaaatgcctcccccttattctgttgtaattcaggagtcagaaacgggatcttggcatgttccaattgcagccaacgactccgaactggaacgaacttggttgtgtgttaccaggccaggtgtttctgcagcctcggatgtggcggtgaatggtgaaacttgtgaaagtattgaggctcaagggtcatgtgcatcaatgagcgttaaactgctggattcgtcggtagcacgtaaaagaaaagaaaggccctcatccacttccctcgag

SEQ ID NO: 246 - DNA, 29 bp, Artificial Sequence
  Primer
taaccatgggccaatcccctgaagtcaag

SEQ ID NO: 247 - DNA, 27 bp, Artificial Sequence
  Primer
taactcgagggaagtggatgagggcct

SEQ ID NO: 248 - DNA, 120 bp, Artificial Sequence
  CsPRORP3 gene fragment
  CDS (1)..(120)
  misc_feature (1)..(45): deleted part of CsPRORP3 gene
atggattccactggctctgccaaagcaaggaagaaatccaagaaccaatcccctgaagtcaagttccagttagacctcactgactgttcgaggaggaaagatttactttcggccataact

SEQ ID NO: 249 - protein, 40 aa, Artificial Sequence
  Synthetic Construct
MDSTGSAKARKKSKNQSPEVKFQLDLTDCSRRKDLLSAIT

SEQ ID NO: 250 - DNA, 1637 bp, Solanum lycopersicum
ccatggtaaccccagaaggtcaattccggtcaagcctagataattgctccaaaaccaaagatctttctactgccatctccttatacgaatccgctatttcagatgcctcaacaatccgcctttccagtaaccatttcaattcttttctttacatctgctccaactctttttcagacccatcaacgaaaaatgacgctattcaatttgggtttcgagtttttgaacatatggattcgtgtaacataacccctaatgaggcaactgtcacggctgttgctcggctggcggcagcaactgatgacggtgacagagcatttgagttggctaaaggggtggggaattgtggaaagttaaggacttatggaccggctttgttttgtttttgtaagatgggtgaggctgataaggcctatcaagtggaagaacacatgcggtctcttggtttgcaacttgaggaagctgagcttgctgggttgttaaaggtgagtgtggagaaagaaagggaagagaaggtctatcagtatttacataaactgagaatgtcaatcaggagcgtaagtgactcgacagcagaaataatacagagttggtttggaggggaaatggcaactaaggtggggttatccaacggggatatggatcaggtgaaagaagtaattttacaaaatggtggagggtggcatggtctcggatggcttggaaagggtaaatggcttgcacagaggtcccaaatagctcctgatgggaggtgtctatcttgtggcgaacagttggtttgtgttgatattgacagatcagaaacggaacgatttgcagagtcagttgcttctttggcaatggaaagggaagtccattccaattttaaggaatttcaggactggctggaaaagcattcagattatgatgctgtagtagatgcagcaaatgttgggctttttcagcagaattttgctgcgggaggctttagtattgcacagtttgttgctgttgtgaaggaattgcatagcaggagcaacaagtggccactggtcatattacacaaaaagcgtgttcgtacacttcttgaggatgctggctatagagagttgcttgaagagtggataaatgaaaagatactttacggaacaccctttggatccaatgatgactggtactggctttatgcagcagtgaaatgtaagtgtttgctcgtgacaaatgatgaaatgagagatcacatctttgagctcctgggtagtagcttttttgcccgatggaaagaaagacatcaggtgaagtacacttttgttaaaggggagattaagcttctgatgccacccacatattctgttgtcattcaggaatccgagaacgggtcgtggcatgtgcctctggcaggtgaggtagttgaggagtcttcaaggacttggctctgcatcaccagacaggcttcatgtgaatctgacaataaacaacttgcaagtgtagtagaagcttctgaagttagtgaacctgatcaaattgcagcctgttgccattcagatagttttacaagtcagaatggcggcagcttaaataaatgttctggtttggctggtaagaggaaagagaggtccccttctccaactccatctcactccagtttacaatctctcgag

SEQ ID NO: 251 - DNA, 29 bp, Artificial Sequence
  Primer
taaccatggtaaccccagaaggtcaattc

SEQ ID NO: 252 - DNA, 32 bp, Artificial Sequence
  Primer
taactcgagagattgtaaactggagtgagatg

SEQ ID NO: 253 - DNA, 120 bp, Artificial Sequence
  SlPRORP3 gene fragment
  CDS (1)..(120)
  misc_feature (1)..(31): deleted part of SlPRORP3 gene
  sig_peptide (7)..(27): NLS
atggacaaagccaaaaacaagaagaaaaacctaaccccagaaggtcaattccggtcaagcctagataattgctccaaaaccaaagatctttctactgccatctccttatacgaatccgct

SEQ ID NO: 254 - protein, 40 aa, Artificial Sequence
  Synthetic Construct
MDKAKNKKKNLTPEGQFRSSLDNCSKTKDLSTAISLYESA

SEQ ID NO: 255 - DNA, 1478 bp, Lactica sativa
ccatggaatccccaacaccggaatccaaattccgctctgatttcagcatttgctccaaagagaaagatttggctggcgcaatctcccttttcgattccgcagtttctcaaaacctcaaactcaatctccaccacttgaattgcttcctttatatatgttccaactccatcgaagacaataaagacgttgcaatcgataaaggtttcagcattttcaatcacatgatatcgagcaagataaaccccaatgaagccactatcacagccgtttctaggttagccgcagcaaaagacgacgctgatttgtcatttgagttggttaaaagtttgctcaagtacaatgacaagcctcggttgcgaacctatgatccagcattattctgttacgtgaagaaatcagatgccgaaaaggcgtatttggtggagaaagacattttgagtatggggttgtgcttggaagaaccagagatcgctgcattgctgaaagtcagtgctgagacaggaaacgaagagaaggtgtatgaatatttgcataagttaagaattggcgtcaaatgtgtgaatgaatcaacagcagagatcattaccaattggttcaaaggagaaacgggggcgaaagtggccagtcgtttgaaagactgtgatatgggtcgggttaaagatatggttttgaagaatggaggtgggtggcatgggcttgggtggataacgaaaggaaaatgggtgttacagagaacaaccattgattcaaatggtgtttgttgtgcttgtaaagatcagttggcttgtgtcgatatcggtagagaagaaacagagaagtttgcacagtcgttaatggcgttggccattgaaagggagacccgatcaaatttcactcagtttcagaattggctggatgaacataatgattttgaagctatagttgatggagcaaatattggactttaccaacaaaactttgcagaaggtggatttagtgtttctcaggttgaaattgttgttaaagaactgtataacagaagcaagaaatggccacttgttattctacatgacaagagaattcgtgcccttttagctaatccttcaaatcgagagctacttgaagagtggattgaaagaggagttctttatggaacaccagttggatcaaatgatgactggtattggctttatgcttctgtaaaactcaagtgtatgcttgtgacaaatgatgaaatgagagaccatatttttgaacttttaggaggcaatttctttcccaggtggaaagaaagacatcaggttcattacactttcccaaaaggtaaacttcaacttcaaatgccaccaccatattccattcttattcaggaatctgagagaggaacatggcatgtgcccttagtgagtgatcacaatgatgagtcattaagaacatggctttgcatttcccattcagacctctgtaaaacttgttctgaagaaacttccagtctcgag

SEQ ID NO: 256 - DNA, 27 bp, Artificial Sequence
  Primer
taaccatggaatccccaacaccggaat

SEQ ID NO: 257 - DNA, 32 bp, Artificial Sequence
  Primer
taactcgagactggaagtttcttcagaacaag

SEQ ID NO: 258 - DNA, 120 bp, Artificial Sequence
  5' LsPRORP3 gene fragment
  CDS (1)..(120)
  misc_feature (1)..(34): 5' deleted part of LsPRORP3 gene
  sig_peptide (4)..(21): NLS
atgaagaatcagaggaaaaagataggtaacaacaaatccccaacaccggaatccaaattccgctctgatttcagcatttgctccaaagagaaagatttggctggcgcaatctcccttttc

SEQ ID NO: 259 - protein, 40 aa, Artificial Sequence
  Synthetic Construct
MKNQRKKIGNNKSPTPESKFRSDFSICSKEKDLAGAISLF

SEQ ID NO: 260 - DNA, 108 bp, Artificial Sequence
  3' LsPRORP3 gene fragment
  CDS (1)..(108)
  misc_feature (1)..(60): 3' deleted part of LsPRORP3 gene
  sig_peptide (22)..(36): NLS
acatggctttgcatttcccattcagacctctgtaaaacttgttctgaagaaacttccagttcacatgttggtataactggtaaaagaaaagaaagatcttcatcttag

SEQ ID NO: 261 - protein, 35 aa, Artificial Sequence
  Synthetic Construct
TWLCISHSDLCKTCSEETSSSHVGITGKRKERSSS

SEQ ID NO: 262 - DNA, 1445 bp, Allium cepa
ccatggcgaaaaaacaaaagccagaagctcagtttcgctataatctcgacacatgcataaagaacaacgatctcgatggcgctctcgctctctacaactccgctgcagttaatcttacttcttatcactacaacgctctcctccacttgctgtcttcttcatcccaatccaaggttatcgattacagtttcgaaatcttcaacaagatgatttcaagcggtataaaacctaatgaggcgacggtcacgaatgtggcgaggatagcggcaactaagtcaggtgaatacgcatttgatttcattaaaagaatgaaaagcgagtacaatgttacattgaagttgagaacttttgcaccggttatcaatgctttctgtaacgattttgaagcagagaaggcttatgaggttgagcattttatggctgatttgggtatttctccagaagaggtagaagttacggctttgctgagagtgagtagtaaaaaaggattaggagagaaagcatacgagtatttactgaagctgagaaattgtgtgaatagtgtgaaaccggaaacagtggagattctggaagagtggtttaaaagcgacaaggcatgtgaggtttgttgtgaaaattgggacgcggataaggttaaagaagtaatggtgatgcatggaggagggtggcatggaaccgggtggctggggaaagggaaatgggaagtaaagaaagggaatgtgagttcaaatggagaatgcagttgttgcaggaagaggctagcatgtgttgatgtggaggtgaaagaggtggagaattttgcagagtcagttgctagcttggctatggaaagagaaagacactctaatttcaagaatttccaggaatggttgaataaccatgctgattatgaagcaatagtagacggagcaaatgttgcattgtataaacaaaattttgcagaaggtggattcaatttgtctcagctagatactgttgtaagagagctcaatgcaatgcgaggaacatggccgcttgttatacttcataataagcgatatcggatgctcatggaagacccttccaataggcagctgcttgaaacctggaaagctaaaggagtgttgttcaccactccaaatggatctaatgatgattggtactggctctatgcagcagttcagctgaagtgcttactagtgacgaatgatgaaatgagggatcatatatttgagatccttggcaggagctttttccccaaatggaaagagcggcatcaggttaggtatacatttgtcaaaggcaaactgacgttagcaatgccacctccatattccgtagtaattcaggaatctgcattgggatcttggcacatacccattgatgacaaaagcaatgaagaaaacacgcgaacatggctttgtgtaactagatcagaatcatttggaaactgcgaagctctcgag

SEQ ID NO: 263 - DNA, 33 bp, Artificial Sequence
  Primer
taaccatggcgaaaaaacaaaagccagaagctc

SEQ ID NO: 264 - DNA, 29 bp, Artificial Sequence
  Primer
taactcgagagcttcgcagtttccaaatg

SEQ ID NO: 265 - DNA, 207 bp, Artificial Sequence
  AcPRORP3 gene fragment
  CDS (1)..(207)
  misc_feature (1)..(54): deleted part of AcPRORP3 gene
  sig_peptide (157)..(174): NLS
acgcgaacatggctttgtgtaactagatcagaatcatttggaaactgcgaagctaatgcaaatggaaaattggaaatttcagcagaagaattgcatactgtagacaaatcttcttcatttgataatatgaattctaatgatggatatattacatcaaggaaaaggaaagaaaggtctccatccccctcaaaggcagttgctagctag

SEQ ID NO: 266 - protein, 68 aa, Artificial Sequence
  Synthetic Construct
TRTWLCVTRSESFGNCEANANGKLEISAEELHTVDKSSSFDNMNSNDGYITSRKRKERSPSPSKAVAS

SEQ ID NO: 267 - DNA, 22 bp, Artificial Sequence
  Primer
gtcattcatatccccagcaatg

SEQ ID NO: 268 - DNA, 22 bp, Artificial Sequence
  Primer
ccctcggagtcgatcaatttat

SEQ ID NO: 269 - DNA, 25 bp, Artificial Sequence
  Primer
ctacagatacttctggaatggattc

SEQ ID NO: 270 - DNA, 19 bp, Artificial Sequence
  Primer
ggactcggccacatagcta

SEQ ID NO: 271 - DNA, 24 bp, Artificial Sequence
  Primer
gcaaggagaacttactcaacaatg

SEQ ID NO: 272 - DNA, 24 bp, Artificial Sequence
  Primer
tgtgacaaaaaacccaagtttcta

SEQ ID NO: 273 - DNA, 20 bp, Artificial Sequence
  Primer
gccattactaccggaaaatg

SEQ ID NO: 274 - DNA, 23 bp, Artificial Sequence
  Primer
gttctggaaaaggtatcaccttc

SEQ ID NO: 275 - DNA, 23 bp, Artificial Sequence
  Primer
ctcagtcgacccagaaaagtatg

SEQ ID NO: 276 - DNA, 26 bp, Artificial Sequence
  Primer
caaaactaacgaccacaaaaatgcta

1. A method for increasing the resistance of a plant to a plant RNA virus, wherein said method comprises expressing in said plant a mutant protein-only RNase P enzyme (hereinafter called CytoRP), and wherein said CytoRP:
is a protein-only RNase P enzyme comprising neither a nuclear localization signal (NLS) domain nor an organelle targeting sequence (MTS) domain, and
is able to cleave the aminoacylatable 3′ tRNA-like structure (TLS) of a plant RNA virus.

2. The method of claim 1, wherein said CytoRP contains the residues G254, G255, G256 C281, C284, E339, D343, D421, D422, D440, D444, H445, M477, S482, W493, H494, P496, C511, and R514, numbered according to A. thaliana PRORP2 sequence represented as SEQ ID NO: 105.

3. The method of claim 1, wherein said CytoRP has the consensus amino acid sequence described in FIG. 2.

4. The method of claim 1, wherein said CytoRP is selected from the group consisting of SEQ ID NO: 8 to 117 and a PRORP enzyme comprising the sequence SEQ ID NO: 118, 119, or 120.

5. The method of claim 1, wherein said CytoRP has at least 50% identity with a polypeptide of sequence selected from the group consisting of SEQ ID NO: 121 to 230.

6. The method of claim 1, wherein said CytoRP is a mutant of an endogenous protein-only RNase P enzyme from said plant to which the method is applied.

7. The method of claim 1, wherein said CytoRP is able to cleave the aminoacylatable 3′ tRNA-like structure of a plant RNA virus belonging to a genus selected from the group consisting of Tymovirus, Furovirus, Pomovirus, Pecluvirus, Tobamovirus, Bromovirus, Cucumovirus, and Hordeivirus.

8. The method of claim 1, wherein said plant to which the method is applied is selected from the group consisting of rice, corn, wheat, tomato, turnip, papaya, rapeseed, potato, tobacco, millet, sorghum, barley, manioc, cocoa, cucumber, vine, soybean, peach, apple, strawberry, clementine, orange, poplar, eucalyptus, ricinus, alfalfa (lucerne), lotus, carrot, pepper, aubergine, zucchini, melon, bean, spinach, lettuce, onion, celery, beet, squash, and strawberry.

9. An isolated polynucleotide encoding a CytoRP as defined in claim 1.

10. A recombinant expression cassette, wherein said recombinant expression cassette comprises the polynucleotide of claim 9, under control of a promoter functional in a plant cell.

11. A recombinant vector, wherein said recombinant vector contains an expression cassette comprising the polynucleotide of claim 9, under control of a promoter.

12. A host cell, wherein said host cell contains a recombinant expression cassette that comprises the polynucleotide of claim 9 under control of a promoter functional in a plant cell or said host cell contains a recombinant vector with an expression cassette comprising the polynucleotide of claim 9 under control of a promoter.

13. A host cell of claim 12, wherein said host cell is a plant cell.

14. A method for producing a transgenic plant having an increased resistance to a plant RNA virus, wherein said method comprises:
providing a plant cell, wherein said plant cell contains a recombinant expression cassette comprising a polynucleotide encoding a CytoRP as defined in claim 1 under control of a promoter functional in a plant cell or said plant cell contains a recombinant vector with an expression cassette comprising the polynucleotide encoding the CytoRP as defined in claim 1 under control of a promoter;
regenerating from said plant cell a transgenic plant expressing the CytoRP as defined in claim 1.

15. A transgenic plant obtainable by the method of claim 14, said transgenic plant containing a recombinant expression cassette that comprises a polynucleotide encoding a CytoRP under control of a promoter functional in the plant cell, wherein said CytoRP:
is a protein-only RNase P enzyme comprising neither a nuclear localization signal (NLS) domain nor an organelle targeting sequence (MTS) domain, and
is able to cleave the aminoacylatable 3′ tRNA-like structure (TLS) of a plant RNA virus.

16. A transgenic plant or an isolated organ or tissue thereof, wherein it comprises, stably integrated in its genome, a recombinant expression cassette comprising a polynucleotide encoding a CytoRP as defined in claim 1.

17. A method of using the polynucleotide of claim 9 for producing a transgenic plant having an increased resistance to a plant RNA virus.

18. A protein wherein said protein is a CytoRP as defined in claim 1.
